United States Patent Application Publication US 2022/0211063 A1 - sequence listing, part 48

SEQ ID NO: 152 - DNA, 7752678 bp, Penicillium roqueforti (residues 1-1,938,170 of 7,752,678)
  misc_feature (471)..(2988): n is a, c, g, or t
  misc_feature (125068)..(125241): n is a, c, g, or t
  misc_feature (177028)..(177803): n is a, c, g, or t
  misc_feature (384131)..(384321): n is a, c, g, or t
  misc_feature (555862)..(555887): n is a, c, g, or t
  misc_feature (601276)..(601376): n is a, c, g, or t
  misc_feature (676767)..(677111): n is a, c, g, or t
  misc_feature (719510)..(719709): n is a, c, g, or t
  misc_feature (1142758)..(1142975): n is a, c, g, or t
  misc_feature (1186306)..(1186928): n is a, c, g, or t
  misc_feature (1335789)..(1335960): n is a, c, g, or t
  misc_feature (1623890)..(1624078): n is a, c, g, or t
  misc_feature (1638029)..(1638196): n is a, c, g, or t
  misc_feature (1653209)..(1653330): n is a, c, g, or t
  misc_feature (1825533)..(1825713): n is a, c, g, or t
  misc_feature (2226335)..(2226483): n is a, c, g, or t
  misc_feature (2393326)..(2393492): n is a, c, g, or t
  misc_feature (2448029)..(2448167): n is a, c, g, or t
  misc_feature (2535304)..(2535417): n is a, c, g, or t
  misc_feature (2536977)..(2537199): n is a, c, g, or t
  misc_feature (2854122)..(2854160): n is a, c, g, or t
  misc_feature (2984525)..(2984774): n is a, c, g, or t
  misc_feature (3020827)..(3020986): n is a, c, g, or t
  misc_feature (3033663)..(3034040): n is a, c, g, or t
  misc_feature (3159256)..(3159377): n is a, c, g, or t
  misc_feature (3215490)..(3215755): n is a, c, g, or t
  misc_feature (3224550)..(3224852): n is a, c, g, or t
  misc_feature (3317434)..(3317714): n is a, c, g, or t
  misc_feature (3542082)..(3542257): n is a, c, g, or t
  misc_feature (3623089)..(3671588): n is a, c, g, or t
  misc_feature (3674128)..(3676164): n is a, c, g, or t
  misc_feature (3690938)..(3691172): n is a, c, g, or t
  misc_feature (3731683)..(3731941): n is a, c, g, or t
  misc_feature (3989065)..(3989240): n is a, c, g, or t
  misc_feature (3992024)..(3992135): n is a, c, g, or t
  misc_feature (4101379)..(4101816): n is a, c, g, or t
  misc_feature (4338959)..(4339088): n is a, c, g, or t
  misc_feature (4339466)..(4339770): n is a, c, g, or t
  misc_feature (4384133)..(4384295): n is a, c, g, or t
  misc_feature (4533774)..(4534000): n is a, c, g, or t
  misc_feature (4697051)..(4697221): n is a, c, g, or t
  misc_feature (4793842)..(4796557): n is a, c, g, or t
  misc_feature (4802159)..(4802531): n is a, c, g, or t
  misc_feature (5082424)..(5082567): n is a, c, g, or t
  misc_feature (5096606)..(5096762): n is a, c, g, or t
  misc_feature (5239354)..(5239492): n is a, c, g, or t
  misc_feature (5277707)..(5277891): n is a, c, g, or t
  misc_feature (5381105)..(5381304): n is a, c, g, or t
  misc_feature (5479285)..(5479716): n is a, c, g, or t
  misc_feature (5512271)..(5512467): n is a, c, g, or t
  misc_feature (5631202)..(5631289): n is a, c, g, or t
  misc_feature (5721684)..(5721908): n is a, c, g, or t
  misc_feature (5728801)..(5728946): n is a, c, g, or t
  misc_feature (5773994)..(5774083): n is a, c, g, or t
  misc_feature (5808460)..(5808504): n is a, c, g, or t
  misc_feature (5832936)..(5833053): n is a, c, g, or t
  misc_feature (5846493)..(5846684): n is a, c, g, or t
  misc_feature (5859621)..(5864342): n is a, c, g, or t
  misc_feature (5865323)..(5948322): n is a, c, g, or t
  misc_feature (5948903)..(5949337): n is a, c, g, or t
  misc_feature (6008391)..(6008479): n is a, c, g, or t
  misc_feature (6324361)..(6325082): n is a, c, g, or t
  misc_feature (6373211)..(6373571): n is a, c, g, or t
  misc_feature (6805550)..(6805552): n is a, c, g, or t
  misc_feature (6846983)..(6847998): n is a, c, g, or t
  misc_feature (6999682)..(6999814): n is a, c, g, or t
  misc_feature (7043444)..(7047251): n is a, c, g, or t
  misc_feature (7056989)..(7057494): n is a, c, g, or t
  misc_feature (7108394)..(7109165): n is a, c, g, or t
  misc_feature (7114302)..(7114990): n is a, c, g, or t
  misc_feature (7152080)..(7152275): n is a, c, g, or t
  misc_feature (7347407)..(7347513): n is a, c, g, or t
  misc_feature (7355670)..(7355674): n is a, c, g, or t
  misc_feature (7379152)..(7379426): n is a, c, g, or t
  misc_feature (7441573)..(7441798): n is a, c, g, or t
  misc_feature (7524923)..(7525042): n is a, c, g, or t
  misc_feature (7750535)..(7752448): n is a, c, g, or t
tccctactataagtactcaaaatttcaaagggttaaaatatagttaagaggtagttatggtgcgtacaagaaaattacccttttaggataactgagctcaaaatataggtgaattttaatcgctcgctataggcgcaatctttgtctaaattaaaagtagtaaattggatgcacaaatttaaggtccctactataagtactcaaaatttcaaagggttaaaatacagttaagaggtagttatggtgcgtacaaaatatggccgaattaggttagtgtcattcttcccgtagccctaaacctcaaagatataccttaactttaaccacgaatttcagacgctacactagctggatacgaaagataagatatgatctagaatgcttaagaaaagggctttctagtgatactaaaataatagtaaatactcattattttatatgtacttaggctctatgatttcctatatagannnnnnnnnnnnnnnnnnnnnnnnnnnnnnnnnnnnnnnnnnnnnnnnnnnnnnnnnnnnnnnnnnnnnnnnnnnnnnnnnnnnnnnnnnnnnnnnnnnnnnnnnnnnnnnnnnnnnnnnnnnnnnnnnnnnnnnnnnnnnnnnnnnnnnnnnnnnnnnnnnnnnnnnnnnnnnnnnnnnnnnnnnnnnnnnnnnnnnnnnnnnnnnnnnnnnnnnnnnnnnnnnnnnnnnnnnnnnnnnnnnnnnnnnnnnnnnnnnnnnnnnnnnnnnnnnnnnnnnnnnnnnnnnnnnnnnnnnnnnnnnnnnnnnnnnnnnnnnnnnnnnnnnnnnnnnnnnnnnnnnnnnnnnnnnnnnnnnnnnnnnnnnnnnnnnnnnnnnnnnnnnnnnnnnnnnnnnnnnnnnnnnnnnnnnnnnnnnnnnnnnnnnnnnnnnnnnnnnnnnnnnnnnnnnnnnnnnnnnnnnnnnnnnnnnnnnnnnnnnnnnnnnnnnnnnnnnnnnnnnnnnnnnnnnnnnnnnnnnnnnnnnnnnnnnnnnnnnnnnnnnnnnnnnnnnnnnnnnnnnnnnnnnnnnnnnnnnnnnnnnnnnnnnnnnnnnnnnnnnnnnnnnnnnnnnnnnnnnnnnnnnnnnnnnnnnnnnnnnnnnnnnnnnnnnnnnnnnnnnnnnnnnnnnnnnnnnnnnnnnnnnnnnnnnnnnnnnnnnnnnnnnnnnnnnnnnnnnnnnnnnnnnnnnnnnnnnnnnnnnnnnnnnnnnnnnnnnnnnnnnnnnnnnnnnnnnnnnnnnnnnnnnnnnnnnnnnnnnnnnnnnnnnnnnnnnnnnnnnnnnnnnnnnnnnnnnnnnnnnnnnnnnnnnnnnnnnnnnnnnnnnnnnnnnnnnnnnnnnnnnnnnnnnnnnnnnnnnnnnnnnnnnnnnnnnnnnnnnnnnnnnnnnnnnnnnnnnnnnnnnnnnnnnnnnnnnnnnnnnnnnnnnnnnnnnnnnnnnnnnnnnnnnnnnnnnnnnnnnnnnnnnnnnnnnnnnnnnnnnnnnnnnnnnnnnnnnnnnnnnnnnnnnnnnnnnnnnnnnnnnnnnnnnnnnnnnnnnnnnnnnnnnnnnnnnnnnnnnnnnnnnnnnnnnnnnnnnnnnnnnnnnnnnnnnnnnnnnnnnnnnnnnnnnnnnnnnnnnnnnnnnnnnnnnnnnnnnnnnnnnnnnnnnnnnnnnnnnnnnnnnnnnnnnnnnnnnnnnnnnnnnnnnnnnnnnnnnnnnnnnnnnnnnnnnnnnnnnnnnnnnnnnnnnnnnnnnnnnnnnnnnnnnnnnnnnnnnnnnnnnnnnnnnnnnnnnnnnnnnnnnnnnnnnnnnnnnnnnnnnnnnnnnnnnnnnnnnnnnnnnnnnnnnnnnnnnnnnnnnnnnnnnnnnnnnnnnnnnnnnnnnnnnnnnnnnnnnnnnnnnnnnnnnnnnnnnnnnnnnnnnnnnnnnnnnnnnnnnnnnnnnnnnnnnnnnnnnnnnnnnnnnnnnnnnnnnnnnnnnnnnnnnnnnnnnnnnnnnnnnnnnnnnnnnnnnnnnnnnnnnnnnnnnnnnnnnnnnnnnnnnnnnnnnnnnnnnnnnnnnnnnnnnnnnnnnnnnnnnnnnnnnnnnnnnnnnnnnnnnnnnnnnnnnnnnnnnnnnnnnnnnnnnnnnnnnnnnnnnnnnnnnnnnnnnnnnnnnnnnnnnnnnnnnnnnnnnnnnnnnnnnnnnnnnnnnnnnnnnnnnnnnnnnnnnnnnnnnnnnnnnnnnnnnnnnnnnnnnnnnnnnnnnnnnnnnnnnnnnnnnnnnnnnnnnnnnnnnnnnnnnnnnnnnnnnnnnnnnnnnnnnnnnnnnnnnnnnnnnnnnnnnnnnnnnnnnnnnnnnnnnnnnnnnnnnnnnnnnnnnnnnnnnnnnnnnnnnnnnnnnnnnnnnnnnnnnnnnnnnnnnnnnnnnnnnnnnnnnnnnnnnnnnnnnnnnnnnnnnnnnnnnnnnnnnnnnnnnnnnnnnnnnnnnnnnnnnnnnnnnnnnnnnnnnnnnnnnnnnnnnnnnnnnnnnnnnnnnnnnnnnnnnnnnnnnnnnnnnnnnnnnnnnnnnnnnnnnnnnnnnnnnnnnnnnnnnnnnnnnnnnnnnnnnnnnnnnnnnnnnnnnnnnnnnnnnnnnnnnnnnnnnnnnnnnnnnnnnnnnnnnnnnnnnnnnnnnnnnnnnnnnnnnnnnnnnnnnnnnnnnnnnnnnnnnnnnnnnnnnnnnnnnnnnnnnnnnnnnnnnnnnnnnnnnnnnnnnnnnnnnnnnnnnnnnnnnnnnnnnnnnnnnnnnnnnnnnnnnnnnnnnnnnnnnnnnnnnnnnnnnnnnnnnnnnnnnnnnnnnnnnnnnnnnnnnnnnnnnnnnnnnnnnnnnnnnnnnnnnnnnnnnnnnnnnnnnnnnnnnnnnnnnnnnnnnnnnnnnnnnnnnnnnnnnnnnnnnnnnnnnnnnnnnnnnnnnnnnnnnnnnnnnnnnnnnnnnnnnnnnnnnnnnnnnnnnnnnnnnnnnnnnnnnnnnnnnnnnntagtaaattggatgcacaaatttaaggtccctactataagtactcaaaatttcaaagggttaaaatacagttaagaggtagttatggtgcgtacaaaatatggccgaattaggttagtgtcattcttcccgtagccctaaacctcaaagatataccttaactttaaccacgaatttcagacgctacactagctggatacgaaagataagatatgatctagaatgcttaagaaaagggctttctagtgatactaaaataatagtaaatactcattattttatatgtacttaggctctatgatttcctatatagaggggcctaataggctgaatataatacaaatataccaattcttagcatttatataagtaatatagattttctaaatattaattatatataaaaatggacactaattgtgggaaatcagctagcttttggtataaaattgaattcaataaacctaaaaataagggtttctataattaaaaatgttatacttaaataggaagatatacctacttctactcatatatatctatatactaacgcctactaatcctctaagtactagaatagtattagttgacacggtgagcggggcgctggaaccggctcccattgcaccgcccctctgccgcccccgaccgcctgcctgtctccactatccccttgccccttccggtatggcgccatctcctctagccccgtttaggtttagtgccgtccctggccgctttactgcctctgcctacttgccgtctatctataaaagactgctcgccctctccatctcttgtcgacgcactttctcttctcttttttcccttctgcccccctttctttttttctttctcgcccttaccgtctcctgcgcatttggctttcagcccgacgcactgcccctttcattttaccggagatgccgctcgatccgacgccgtggtcgttcggaccagcgtgggctgcaatgctatccagtcgctcaggaacagaaacactgcggtgatctagccatccatcgcatcgcattattttgtgtcaatacttcattttccaaagaagtctacgaagctatctagatcgctttctgctggtgagaccttcccgttcagtggtctgttattccgctggcatcccttgttgcgaagtctccccaattgccctccttgatgctgcatgctctgcttcatccgccccatcgcggtccccacctgaggttacattgcacagcccttggcgtcgcagatctactctcggccgtaaacgcctcgacccccaatctgtcgtcatcgtcggcctctccggtgtattcgcacccaattgatccatctcggcagcatgccacggtcatgcgagccaatagcaaaaataccgcacattcgcctgaccccggccaaatgcagcgtcgtgaggtcaatgcctggccgggctatgataagacctcacgatagcacagtctggcgaatagaggctttgctagcgacagccgtgggcataggtcattggtcgggagccatcagcgagattggcaggggttgttgcaggtgccctaaagctgaaaaagaaacttgtgtcgtctcacaactttggacgcatcggcatgggttgcaggagatggtcggcgtcttctgcgctatgaagtaggcggattacgcctcgtggtctataaaagagacgacgattcctcccaagtggcaaatctgtaatcccaccttcccaaattctcccacctttccattctcaccgtgccctacccactaccacatacccaaaatcccgatcccgttttctctatttctacgagtggtcccgattccattatatcgtgtacttgctcagcagcctttttcacaatatgtcgagcgatagttttcgcttggaatctttccggccgtggaatcctttccaggacaaagcgcagcctctgcggaattctctcgatatttgtcgttatccaagtcctgtctcgatcactgctacctcgcctccctccaattctagcaactcggcctcgacgaacccaaattttcattttcataaacctgagcgacacccccttcctccccgaccaccagtggaggcttgcttgaatgacagcctaccacaggagataaacactcagcaccaacccgctatgcaggatcagacattatgtgttaaccccggagttcaggcgttcgacttcgaggatattcgccaactgcaggatttaccaagctctggagacgaagaccgtccgatgatctatgataatctaggcgcagagtctcagcacccactcgactttgagtcaggcgatccgggattcgcttgcactaccagtcagcactctcatactggcattactagaagttctgttctgacgagcgagtgttgcgacgcaacaattgatccggcaatcctgggtgattaccatttccgagatattgagcagaccccagcaagaaaagacactgacgttgtggtcccttctcgttcgtcggataaaactgttcgtggccgcagcatgcgaccaaaaatgaaaccaaggcggcagtggtccaaaataaacaaggtttctgtcgtcgtggacaatcgccacgtgaataggactggccggagcactcgagcaaacggccccgttaaaatgtcgttttcaattcttcgggatcaattctcttctctaccggtcgaagagcaactgcagttcttgtcctggctgtttcagggtgctttgtcccaatgcctccatgcttcatccagcgcggatggcgcatcggcattaggttctatctcgggagaggaagaaacctcgactccaccgcctgcgcaaccattcgcaggtgccaacgtggtcgatatacagcatcctggctcctcgagaaaaggactacctttcattccggaagaggatcgccttctggtgaagcttaggaaggaagacgctcttacctggtcggaagtgatcaagcgattcagtcggaagttccctggaaggagcaaaggctccattcaggtgcactggagcacgacgcttaggaaacaactgctgtcttaagctagaaatgcatataggaagttttgtcgatttgctgatacacggtcatgttatttcaagtattgttgtaaaccacccctgtctccatttccaatttccaagtacttctttgcattgcattgcacagctcctaatgttgtagctattccccagcctccttctttcgaacgctgatttatattctgtccttatttttgggcgtgttcgtgcgaaaggtaacagtttcatgtttgttgagctcgaagaaggcataatgaaacgaccgcctttcttaggcctattatggcgatttggaactatgaaacatgtgagtaacttgtgatgttggtttagtgaaggtatgtaccgtcgcaatttgaggctgcaggctggtatgtatgcaggcaagtatcgtcaagcctaacgaaataagaaacaaccctattgagccaatggacgccacccacaaggctcgttgatgcctggcagcagtgaggagcggataatgccagaataatttgaatgtattcgtttcgatatgccatggcctcatgcatattatccaggctctaataacttgggcgtgaatgaacccgagcccagcaaaagcgaagatcataaatgaagaaaacaaagctctgcgatgctcctgtcatttattgattaacaaattatatcaaaaggaaggcagctagttaaacgtaccgaaaaagccatagaaaataatagaatggcaactgttcctacaaacaataaggcagatacgatatgggctaaccagtgttgcaaagtagaaacacttagatactgacagaggtcagtgttgctcttcttctgttttcaccattctcacctcattcaaaatgagcaaaagaagcacactatcaacttccagctgtagcatccgctgagacagatctgaaatgtgattagtgaggaaactgatttcagcatagaaagcaacttgccgtattttggatctgctgccaacagtgccaggaaaacagaagtgattgatcccagaaacacgaaaccacctatcacagcttgactagagatgagtggttccttgctaagcctttgcaagctcatagcgtcaatcgacaggagccagaaggcaagacttgctccgcagaaaattgatgctattatcgacgcagtcagttggaatatcacctcagagtccatttttatgttgacactttcattgagctcgatctacacggtccatgccgctatttaaataaagagccctttacttccctagatctcgctcaatccgacaagggggcgtgcatctgcagctcgttcttcctatgagagacgtccccattatctttccgggttgcgatattgtgatggggaaacgtgaaatagcgatacttcctagtcatagacaatgatcagctgctgaagtcccaaaaatggcccacagccccacctctatcccaccatccattggcgcattggcggtgcacgtcagcaaacttaggcagctataaacttagacatcctctaaaactgtggcccataatactttcaatcttccaactttccaactttcaaaactaaacgtcgacatccatatcacaaaattagccatggctgctatcatcaatcaattaaactccgttgctagagatctggatgccttgaacttagcgatgcgtgatatctctttgtccgggaccgacctgcaaacgttggaaacggtcgctgcaaacctcaaagacatcattgttgtcatcgaagcaaaagcaggactacggaagcgcccatggatggagcaggcgtggaaggacagtgagccttacagactcaaagcgcaatccataattgccacagtgctcagcaaaggacggttgcacaatccagcggtattccgcaggaacatcaagttaatctactgcgggtcacagcaatctgagttcgattccaaagataccaagtggaggagaggtgtggtccagaaaagatgttctaggattcaacaacttagcccagatggaattgtctcgtgggctattgcttatcctccaaccacatggggaccatgctttatgtcaaatgatacttttgactgcctcatagaggatattgagccaagagacaggaagaagtggccggacgcagtatgtcaaacactttccagactgaaggacggggaagttcaggggtgctacagtcttgagcagctcgtgcatagtaagaggacccttggaagaggcttttctgtaactgacactccgttagacctagagaatccatcccagcaagatgaattcactaatcccgatatgcctatccaggcagttcaaacagcgcctcggaaccccgacaacgaacaccgaggtaagacatatcgcctgcgttgccggatatattttgattctttacagagatgaagcacatgttcacaaacgccccaaatacgatggtgatgcaactaccgcaaccattccgtgctgcagttcaaaatagtgcgctgtggaagtgggaaaggtctcagggacacgggacaacagcttgcgtggcaacacttttcccgaaggacgaaacacaggatgtatcattcactatctgggttggtcacaatgatgggtatagactgaatgacacctatggcgtgaagcatgcactttcctcctaaactatccagcagacaatttcaactcccctcacatacgtcgtgtagcccttcggaactgcgaaatttttgtactcggtgacattctcctcgagtatttttcgatcctgcgcgtcttcgttgaatactgatatgtatagtccttgaaatttgattgttctgtcattttccgggtccggaggaaatcgatggctagcaatattccgttcttcgcgcccggcgagggcttcgtcacccttctgaaaagcgtgtcagtcaagaatgaagaataaggatttgatggtgaatcaaactaccatagtgcaactgtagaatatcaagcaagctgatcaacgttgttcaattttggaatggttttatgttttcgatcttccttcctggtgcgacctttcgttctggtatttgaagagagtggggtatgacaacccagattgggcagcaagtcaacggtggccagcgcaatgcatcgcgtatttgtgcgccaataattgttgtagtagtatcccagaaatacccaagttaaggtagctatggcccaaacgtagggttgacaggcttgaatagcagttctgatgatgttcttgggagcaggtcgacgtttggtcctcgcgtaccaagttaagaggatcataagggacccacatcagtcggatcaactcggggtacagataattatgccccgttacaaagccattacataatttttgactcaagtggtagactaccaacttggctacctactacttttacagggtcccgaagctatcttaccactaataacttggctacctaccacttttacagagtcctaaaactatcagtttctaagaacgaggctcgatgtcgtttattcaggtccaaaagcgacgccaccaactgaatgattcctgaatccatccaattgagggtggtattacttcatatgctatgcaccatgaagcacactcccatgcagctgaacaccgaatacgtggggggaagcaacgtcttgctcgaacggtgactagactcagcatccaaccaaccaagcatataaggccccgcgaattcccatgtcctcaaaccttggataacacatcaaaataccgttctctcctcattatcatcacagccacgaataccattcgattctcgtatacacaatgaacgccatcagcgggggtggtgcccagatgtctcttatagatgtcctctttcccggtttcagtatggcctctgcctccgcgcagcagcttcttgctggtaacctggacagctacactcggctcctttgtaccttaggaatgcttgtcctcttcacttgctatgcagtccgctatgttggggagctagtgagaagccacttcagttcgtaattcttcctttgtgatgggatgagtctgacagccaacagcttcgacaatccatgtctcatattatgacgaagcgtacgacatgctagtcgactggatagcccaccaaccgtttgtccgcaatgctcactcagtaattgctcgtgtgagatctccacagcgaacaaccatctaaagccaagaaaagaagaaacctttgacattttcgccttaggatggatcctttcctttttggtataaaggacacctactcatacttcactgcgctgtcaaagaccatcgagaagacatctacatctcctccattggcctttatccaaacattctcaaacagctcgttaaagagtgccgagggaattaccttaataacattaacaaaaagatcactgtctttaagcactgtgaaggggactagaagaaaactaggttgagaccagttcggcccgtcttaacagtcattatagacaaggaagtacaagatgaccttttaagagatatgaaggacttcctgaatgaagatacacagaagtggtacgccgaccgcggtatcccctactaacgaggctaccttttatatagacctcctggaaccagaaaatccagcttcagtctatccctggccggggaatttaaactagatatttatacgctttaactatcagggatttctgacagcaagctgataaagctattttctgagcttccgctgcactgcatcgttcttctagaggacgtggacgccgctaggatagggtgcagggacgactccgatacagaccaagaggataagtcaacctctagagtcaccctatccagtcttctaaatgttcttaatggtatatcatctcaagaaggtcgggtgcttgttatgacgactaatcatatcgaacatctagatgaagcactcattcggcctggccgcgcagacaagaaagtatatttccagcttgccgataagaagatttctactcaactatttcacatggtcttcaagcagacggcagaccacaaggggtcaaagcatgaatgcggcgataaggcgattgagagacttgccaataactttacttccaaggtgccagaccaagttttcagtcccactgaggttttatcgttcctattggagcagaagaactcgccttttagcgctgttactagtgttgaaaactaggtagcgaagacaaaggctaggagccaactgaagagagagggttcctaggtacaagaaggacgttaagaactaggaagagagggcacccgcgcaatagagaggcaaaggggcataacaccgcgacgacatttcgtttatagacaggactgaccaagcctatgtcgccaattggatgttggtttaatatttgaggcgcttcactatttttctggttttttccctgccctttagatactttgaccctgccagtctttttcttggcccatcgatcttagcccatcgatcttaggcccccactctttcagttatttcccatactttcactccttaatttgaacacatttatcaacttcaacctgtattagccagtaggtagcttggagtcctatttggccaatgctcgcgctaagagaagctagatctccgcggaggaacttgatgttaaccacagagccctaatgcattgggcaaggctcaagcgcatattcaagatcgcgaaacaatttgatatggtgctacttttggatgcattcatagagcgtccgattgcctcccatggaagttacaaccgccttgtgactgcctttttttgcgaaaccttgaatactatgaaggtatcccgtcctattcttgaccgccaggctgcagcccgaatcagttcgatatcccttattaccggacgccgacacagcgttgatgtcacctcaagaaggtcgggtgctcctcatgacaacaaatcatatcgaacaccttgacgaagcacttttttgtctaacctaaccctaaccgaataatttcttcctccaggtgttcgatatgatttgttgtcatgatgagcacccgaccttcttgaggtgacactctagcaaacttgtgcaggaacgcataattatcatgtattatgcgataactaagccaataatgtaaacataattcctcccgccccatgatctgacggtatggtcgtcaaccgagtcgactaacgcggtggtctgtggtctgatggtcatcatatgtagggaactgtcgagctagacaagagcttttgcttgctttccccgtgccgacgcgataactacgccaggtattgccagaagttgattcaagaacccgacggcgcttcaataatttcacatcctctaagtcaatgacaattaactggccactgaggtcatcccacaatatattgcgccactcactgtcgttgtggacaactctgtgcgaccggagcacggtcagagctttcttgcgctcctggttgaagaaactggaattctcgttattaattatatgctgaagccgcgttcctgactagctcaagaccatcatctcggccattattttaccatggtaccaatacgcgacctgtggctggaaggatccaagacagatggggatatgatgtccttgtaagctcctgaggtgacgataattgtccgcctccgcttaaaggcgatgctgcttctccactatggtagctttaatgaccacagtatatctgtgtgatagaagggtagctttaacgaggtaacccgtccaaccatagacgtggagttgttcaaacctatggtttcggttttaggcaagttgacagtgaagccggcgtgtgaactcatgcggtcccatggggtgtctctgtccactgtggagtttccagttagggcattctttatctagagggtctcggttaaccatgccgcggatgcaggcaattgtgcagtagggtcgtgtagattgcctgtcttttcgagaggtctgtttgttaccccgactggctcgtgtgctttcgctttccttagtcgattgacggttattgcctcggtcgcggctcgacctgctgtgagtcgctgctgcgatagatggcgaatacgattctttatcactgccgctgccttcggtcgacgaatgctttagagtagacatgtctggtttacagcgagtacgggatcgtgtattatgtgtcttcggctctattttccagtgcgagggttgataattggaggctcgagggtctttacggagagtctcggggatttttctcaatacatccaggtattcgacctcctaggtctttagtgtattatatgccacattatgccactcttgagacggagcttcagcggctagcgcttgaagggtgaatgcaagtacctgaccgatagcggtccggtggaggcgcaattcatcgtccgcctgtacgtcctaattcgggatatatataaaatattgaacaactgtgggattatcctccgggatatagagaaaaacaaaagcctccctggtgtagatgtagccgtattagaccccactgtcgatcatatatgagaatatctgagtgaccacagcggcgacgaggtaggtggcataaaacttaaacgtatcgccttcctggttaatgacatcgcgagctggatctatctggtgtagacctgccaccaattcggggattgttaccttgtgcggtgctttgaactctaccgtatatactggtatttgtcgttcatcagccacaaggtgtacgcagaactggtcggcacgacgattacgtcttcgtgcagtgctatccctcctttttccctgtgccccttttcttccccttcctctgccctacccaggcttagtgttcgcgagtcggtggggtgttcgcgtgccctgaagattcatttgctccaagccgttcttcagcgaaatttccgatgggttcacgcggtcgtaaaaggtgacttggccttggattctaaacttatgtcgaaaggcttcatcatctcgcaaggccttgataaccatttcaataaaattatccaccgtgtctcgctcaaaatttcgaagggacgcttccgaataaatcgacctgttctggatattcgtaacgacataatctatttgggtattagaagggaagagagggtgtgaggtaaaggcagccgtgcggtcgaatttcctccagacttgctcctggagctgagggaaattaagccaagggactatgcgcttgggataaagtctgttcactgggttggtcgcatcgccctgagtcgtgagggttgcatccgtctcgactcggatcgcttgcgataaagagttgtgacagcgatcgagaaggcgaaacagtgtattaggctccactcgccgctctgcctcttctcgcgcctttttctcttcttcttcacgacgctctgcctctcctcgcgcctgtctctctttctcttcacggcgctgtgcctcttctcgcgcctgtctctcctcctcaagctgacgtcgtagatcggcgattgtttcttccattgcttgttgaaatcactattcggtaaataatcgaatgatgtaaatcaaagtcaacatggtagggagttcgctgtctggctcgggagagtgacccgtcaaggcggaatgcgtccagatgtttaccaaccagcttactcaccccttggctcgagtcgattcatgcctaaggcacgaaaggcaccaacacgctttggcctttttaatggagcaacaccaggaactaaatacaaatcctcgcagttcgaactcagcaaaaagccactttatacattatatcgaggtcctaaaatttctgcaagttttgagcgcaaaaagtcaggcaccactttttgttactttggctgattcatacctcacggccagggacagtgaagtgcacgtgatgaccaccttatgtatcgccgtggctaacataagccaacaagcaagaagggcatttggatcgtaggcctggggaatatggtataaaggggaacttgtatgcctagccaggtgaaatgccccgaaacgaagcaacggagtgaaagggattacaaccgtggatctgcgtgaaaggctgagttgacgttagaaacacagccaattttcgcgtcgtcagtaccctacagattagaaaaactactgacgaagacagcatctcttctctctactagtctactagtctactagtcattggagaggatttgttgagtggacgcacaaaatcggcactgcacggtagtcggcctctaccagcagacataggcagcaagcatccatgccccgtaatgcgcagaatcggccatgccatttcgcgttatatttcacccggtcggggctagttccaatcaggtcttagactcgggccggtccagctggctgagctatgccccctcccaataccccgcagaagacagtcaaagaacactcgagtcgcccggaagttgaatttcaggaacacagctttcaattcacggaaaaagatggcgtcttactgcccccgatgctaaaaaagctttcctctttttttcagccagacagcagcatattagagactccctcaaccatcacgtttgccatatctgctcatctcctcctgattatgcgacagaagatgaactagatgagcatctacaagatgagcacaatatttatggaaagagatagctcagttgacaaatttcttcgccttgtcagatcttgcattgccacagccacatagacggttctatgatgactcagttttatcttttcccttgatatatctcatttattataaacaaccttcgggtactgtcctcctggcaacattggccgttttctctccctccaaaaacaggaggctggggcctttccgtctgaagtacgcatgcatacgttaggtgaaatctcggactttccatcttcccgcaccgcccggcggtaaggaacatttaacaagacgcggactcgctgcctttgcggtgatatgcttgctctccaccaaagcagtcattgtaggattggcggtcataaagaccgctcagtcagtctaatttgaagccctcgcattcttgagggcatatggtttattttattggcatccccgaatctccacctagtcccactgatccccacctgtaatacacaacgtacctagtatttcaatgtgttttagagatggtcaaaatgtggttagcgtatctcttaatctcgctgatagtgccactagaccaaagtaggcagcaccatgtctgttatccccctcagtcaccgccatttcccgccattattctaccacacaaaaattatggtaattattcaaataactaatattcagtgtaccgtccattagattcaataatagcctgcaccctccgtggcataccctgtgatagaccttactaaggtcgagttgttgccaggcctcctttgcattaactaactaactggttaacaaagtactcggtagttctagtcgtcgcctactgacaggcactcttccagactatatctgtgacggccaagggggtagttgagggatatcatcaaatcaatacaattacttttcaaggagtgattggcagcgagctggggaaccacgcacgaagtaccgcttaaaacaaaaatggggggagtaacactagactactctgtccactcaggctgcctagtcttctcagatcactctgtccattcaagtaccttatcctttcgtgaggatccacaatagttctgttgcccgacttatacatttgttcatgacggaaatctggcggtacaacaatgtacgggtaacctcagtggtattgagctctctaactaacaaaaatgacaaaaccgcgaaaataaacaatctgtgcggaccatgatgactaactgtaacatatacttttgtactgtatcgcttgtaccatcggtcacatgattttctgggtattttaccctgtctcaaccatgtaaactaaccttggcattcgacagttcactccactcctacagacctatatacgtcacgtgacgcaggatccaactctctggggcctatgcagggtacagcacgtcagtcagtcgaagcccataacagtatcagctgatgctggcaaattgggcttaacgttggtcgtgcttgtcatactcgcggcaagccctttttttttccagtgataaaccaatggccgactggaattcatcacgtgttatgacggtgttatgtttgcactgtttgctcttgtcgaacaatacataaagcccgtgaaatcctttgttgcacttcggcggcatcatttttgttcaccgagatggataacgagcttcaatcgatcattgaactaccaactattgccgacattgaggcatcgaccgatgtccttagtatacgaacaaatgccatcaaagtggttcgagtgaaggaacgcttcgcggtcaaaatcgggtattcgatcccgcctttggaagctgagaacatgaaatttgttgcagccaacagcaaggttcctgtaccaaaggttcacgccaacttcatcgacccagagacccagaaaagatatgtcgttatggatttcgtccctggtacagacttgcagaaattactgccatcgctcaccccaactgagaagacgacgatcagccagaggatcagacaggcgatcaatgaactgcgagcaataccatcacctggctactttgggaacttgaatggcacgccttacatcgacggtgttctttcaacccctgataacaacccaatcatttccgggccattcaaggaccagaagcagatgaaccaaggaatactggagagactgggccaaatgcagtctccacactacattcgattgttgaaagaaatggtcaaccgcactctcaagaaccatcgaattgtctttactcatggagatctgcaaccgaagaacataattgtggagcgaaaaggggtctgctgaggatccacaatagttctgttgcacgacttatacatttttcactccaccccaacagatctatatacgtcacgtgacctgaaatccaactcgctggggcctatgcagggtacagcacgtcagtcaaagtccataacagtatcagctgatgctggcaaatttgggcctaacgctggtcgtgcttgtcatactcgcggcaagccctttcttttccagtgataaaccaatggccgactggaattcatcacgtgttatgacggtgttatgtttgcactgtttgctcttgtcgaacaatacataaagcccgtgaaatcctttgttgcacttcggcggcatcatttttgttcaccgagatggataacgagcttcaatcgatcattgaactaccaactattgccgacattgaggcatcgaccgatgtccttagtatacgaacaaatgccatcaaagtggttcgagtgaaggaacgcttcgcggtcaaaatcgggtattcgatcccgcctttggaagctgagaacgtgaaatttgttgcagccaacagcaaggttcctgtgccaaaggttcacgccaacttcatcgacccagagacccagaaaagatatgtggttatggatttcgtccctggtacagacttgcagaaattactgccatcgctcaccccaactgagaagacgacgatcagccagaggatcagacaggcgatcaatgaactgcgagcaataccatcacctggctactttgggaacttgaatggcacgccttacatcgacggtgttctttcaacccctgataacaacccaatcatttccgggccattcaaggaccagaagcagatgaaccaaggaatactggagagactgggccaaatgcagtctccacactacattcgattgttgaaagaaatggtcaaccgcactctcaagaaccatcgaattgtctttactcatggagatctgcaaccgaagaacataattgtggagcgaaaaggggtttgcaacaatggagacgcagacttcaaagttactctgatcgactggaatttgtcaggctggtaccccgaattttgggatttttgcaattcaaccttgtattgtcaaatgaaaccggactggcttgagcttatcccggacatatttgatcagtacccgattgaatacctaatgatgcaagttgtctactcgtcggtcttttactgatggtacattgggaaaatataaaacattagtcttagtcgtcaaaaaggaaagccatagactctgcattttacattttcttgtacgcgaaatcaacctctcggtctcttttcaacaccccaaccagagagaagagatcgtttaaattaatctcactgtgaatctcacgcttatatagtgagaagcatagattcactgggggaacaggaggaaagaacaaaattgagcttgtgacccagagtcgtggtatgttggaaaatacgttcacctgtagagagaacatattttacaagggccctgaggcaccagtgcgcttgctttcggatccagtccgtcagacgttgtaccttgataaatggacttgactgacttacctcattctaccgctttaagatgcccttttcaaatgccaatttctgaacatctcgcaaccagtctccacaacgataaagtggtgtaccaggatacaattgtttgcccccaagcgtcaactgggctcgaggcgcctcgactgctctgcaacactccgtctcgaatctgggcaaatctgtgtgtgcaatggatccaatgattttcttcgtgcctggaacataagacgccgagagctcagggtcaaaggaacctcttgggtcgtatctcataccctggagtaaattcccagtgacatgatagagacgtcctctttcagacatttggggggcggtggggttgatttcaatgtaaatggcttcatggttaggtgcaccaagatattcggccgtgtaaacactgaaagacatatttaaagagttttgaaatgttgtggtaactgaaaaagctattgaggtctgatgagtgggctgttacgctcgtacaagtctctttatatgttgagcagaaacatcaaggacttcatcatggctcagaccattctcgtcaatatgccaagttggtgttgcatgtgtctacgtgcatagaaggtaccgcgcgccaaaatgcacgtttgacgctgattggtgtacaaatgaaatttttgtgcgcaggttgcatttcacggcgagacgcccattacgaaactgctgctaattctcctttatttttattttctattttcgtacaagtcgattagtttcttggctcttgccaactaagtaattgaaggtggttggcgccttcactagatcacggcccgaaaagagcgctaatttcccttgctcattgagtgcctctattaagaaaatcatccggcttgaagtaacaatatttggattttaggcagtgcaggtgttaggtgaaaccgtagagtgaatggaatagactgctctccagtacacattcactgacctaggtgattagtcattcgctatccttaatggatgtgtgtttgatactgatgacgataaagggtgtttgtttgtttcagcacgaggttacatctgcctttcgcgcgcgttacatagaaagaaaacattgaaattcagcaaatttttgatggaaatacaattcaacagaagattggatttcaactttaaaaagccaatcaattttcagcattcattagaaacccaaaacgaagctcccgccaaccatcttcgctataaggatcacggtataaaaacttcttgtcaggctgcgtggccacttttgtaacaggattaaatgaggaggatccttggacagtaaatgcaaaaatattattagagattccaagtatcggtccattgcggagcactgtggtggggtcaaataattgttcacgtgctctattctgttgtgcccaaccccgcctcgtcgctcgtagaaggacaaggatcaactcgattatctcaaccgaaaacaagcagtgaagcagaactttatctgctccctcaatagctcaatagcgttgctagtagctgttcaatgaatggacctatggcctaccttcgaccggctctgaaaaaacctgagcaggacccttgcgaaaaattaagaaactggcttccaaaggcagaattttcagcgaaagatgatacgccatacatgaggttatatcgaaacattccggcagatcttctccagcctttccaaaaggaggtatggaatttcgttattgattttcattcatatcccatacagctgaccttaggctagaatataaaaaccagcttaatacaattcgcgaacggagtatccccgtgggaaccctacagcactctaacagtgatccttttatacgaagacaatgtaaatgtatctcttatcaatcacaacgcaaatatcctactagcgaccggtgacttaatagaatggagtaggttaatagaaatcttgaattcgtatatctatatggtgacctagagcaaagagactatatgatagtctcctctaagagataggttattgtttaggtaagggaatacctattatttaggagaaggatggtatataatagtcaaatgaagtagatagaagcgctgccgtttcttaaggagctgagaagccggaatgcagtaaaataggtatcttagatatagtattaaaagatagaagagaataagaaaatatttctatatctacaaaatccggaggatatattaaatatagatcgcgtgagtctatatattctattagctatcgagatattaactagttaacaatcaataaactatatgagttatcttagtgaatttaggggagcgaatatactgtctaatatccgtggactatatattacagatctagactaataagttgaagtcgatggttatatatcacttactataggaaacccttagggcttagattcctgcttagggaagctctctcctagtctataggagtcagtattatgttaatagatcttattacccggaaggcttacctaatagatttagaataaaataattaggatcttctatagaggttgtctgtagttatactatattaatcgatagaattagattaggagataggctgtctagatttaaattggtcctactgttaatataatatcttttccgcgctttatatagtaagtcacttataggctacgagtcccttttggtttaggattctaccctaaaatcagcttatctatctagggaaaattgatatataggaaagaagagcctttgtctttccagtttatctatagtatctgaaccaaatggatctaggtactattttataaacgattctagagtaatatcaaaattgcagtatagagcattatatatatcggaaaatctagaggctaattgtaagtaaaaagtaataagcgaaacagtttatagatatactagacacttttactaaatatatatttaataatatatagaacagagagatagtttaaatgtaaactcgctaggcttttcttatattaatctttttttaggtagtctgtaaatatagatatcgattgggttactttcgcctagtaccttaataaagtaaaggttggggtaactagatctatatatcagctctatataaacctgattagcaagaagcctaacagtaaaataagatatcactacttctaatatcctaaccgctctctgcttaaagccagttaattacctcagccccctaagccacactataccgaagttcctaaagatagttagctctgctttttgaaatatatcctattatctagtttaccgattttagatctacactaagacaatatataatatgataaagtatacctagtaagaaattctaataggatactatagatttcgcctacttcgcattgccggcgcatttttgtgtaagcgaagtataagccctaagagtttgaatgatatctgagtgccgagaatagatagttaatattagggaattactgtctcttaggcaattttcgttttagaataatgaatctagaatggaaatttaagggagagatatagtactagaccacttttctatataagggatcctattaataaaattttctaaaggtttcttctacgtttcttctgactaagatgaacccgatagcgaaacccctttacgcttggtcgctgaaagggattgagaaacgggaggccagagaagataagataaggtgatttcgcgtggaatttgagattgtacaaggatatacggtgggacgtaaggcgtctattctcttagtatctgccgaaggccataaatctgcctctccaaatcggcaatatagtcggaagtattgctgggttccatctcgcgctcaaggaaagatgaagtacgatgtagaatagatggttcagaccactgggagacagcggggaaagcgagttaacacgaaatctactaacaaagaatgattgggcgtgacaggggtatgggctcctaacccatacccctatcacgcccaatcaattgcggggcagcatctgcccaatatatgagctcacatgcacgtacgctcctcttttcgtgtgccaacttcttcttctggccactatagatacctgtgtcgacaaagccagcatatgtaaggccagagaggcgaaaatggacttaagatacgtggatggggtatgatactagtgcttttaaaggtccatgtatgttcgtgcttgcagtctggtgctaggctgccgctagtagcttacatatgagctttataattgatggcatataaaattcgagaagtattgatatctcttagtggcgagaatattatctgcttgagcctacctaaagtttggtgtatgcttttgagttgtatatctcccctctttacctccctgggcaactcgtatgattctactcatgcataggcggacccgctagacctgaaccaagaaacccagctgatgtttgaagccttctatctctactgacgctttgaacgcaaattattctatactatcagaagctggctgtccaaccgacctcatgtactgcctgtcttctgaatcgctctggtctcttcttccgaactggatacaatccctctggatatcagaaggagaacaaaatagagaatgcctggatcaaactgtccctactgttcccagcctgtatacgagaactgaaccagcggtatataagcttcaaaactcggaagttgtatataacgtcacaaagcctctactagtttgcatttcaaaccaaatagagagactgccacggacacgcactaaatcacttgaaaattatatttgtgggttttcctgtaaactgtaagccttttctattaccttctcacattttacttgctagcaacccgaccctaagccatctctatgaaatttgatgacaacacagactgtgagactattgtgcttcctggcatccctctaggcattgaatttgtcaaaggcaggattacttgtatgggagagaaacacctatcacctgaatggtcaactatgtgtttgaaaaacaataaactggctgtgatcatgttgtcaaacattagtcaaggaccgagtcttcagtaagtactcttctttattcttaggcttgttgaagtaatctaattttcgatagccggacctctagtgactgatcggccagtgtggaaatattcccggcactttcgcggtataatcatatggctaacttttgtggccagatttataagtcccgatataaatttcataaacagaaatatcacgatattctataaattactctctaaattggatgcctattcttcgaatttgagcggatgtggaatggaatggaaacctatagctttagcactggcgtttctgcaaattcttctacccttatgagggacttcactaaagtgattttcctaataaaatgaaatataacttggcagattattgactcttggatagtccctgatccctttccaacgacagtagttactgttattctagggtggggaaaggagtagcagctggccaatgacataagggcccagtataggaaaatgattggctcagcgttactctttaacctaaagcaacaatgccctagttactagctgaacactatatagaaaataatccaatcatcgtaaattaacattcctatcaatacttttggtttagatattacatattttggcaagattggtgccggtaggcgattagtgaggccatcaaataatggccttgcattttactctgttcctagcccctacgaagtacactattccgcaggggcttttgagctttacacagtatcccaggaagccacatacatcagcttgtggaattaaaacgatttctgcaatgtagcagcttgtcaaggctattatggaatgtcaaatatttctaggatgtgagtagagtaggtacccattcaagtatataaagacaaagacctctcccagaaatctccgaaagaaaagcaagcgttagatcaataaaaatggaattccctttttgtggtacgctcttcaaaccactatcgcatcattataaagctaacccaaggacccccagatcctgatatatccttacatatatttagacgaatagggccacacatctatgacgttccagatggtcagaaagagtatacctgctaggcgaggctatattagctaataacctacagactttatcataaaactcgatgcaacgaattgccctatgtacgagcctgtcgataacaaattatggatcctgtgcgccggaagcagcactactatatattttacacttgatcggatatacgaagtccttctggaatctgagacctgtaaccatatttgggatctattcgaaaaatcctttttattttcgatttcccggacgtcgaagatagaagaaatatgcttggctaagccaggtgtctatatagtccctagcggtaagaagcgtgttatgacttgttaagttagagatagaggctgatatgcgatagacttgatgataatgcgcacgaacagataggcctccagaggaggttattcttataaacttatttcgaaaaaattacatagcgattgtcaacgcctctttgcgcttggccgagacggacaagaacttatgctcgctgagatatacgcgggtctatcgattcttggtaaattctcgaggtctatactcctaggaatgattgccatcatgagggactggcttcgaaattaagagttttctattaccgatgagggggtgttgactaggcttgtcttacaattagggcggcctgttaaaacccagggcattgctaatcttgtgaaaacgtgggttgtctaaggcgaatatcgtatgactcaacttttacggaatggagactattgggatgccaagtgcgaaatgttgggttctcactattggtagcaaccgacgggaaccccataggaactcttgaatgctttatgttgaaggacgcccttttaccaccgctctattttctttgatacttcacattagtatatacaattgtatttctcgttaccttttccccccttacctatagaagaataggcggttcgtgaggggctctatcgggtctggtggaggccaatcgggtgatccctcacgaactagagcagctttctatcttctatccgttgattcatgtaacttatatgaattattgttactctacttggccatagagttgtgtctctcaagagagtctatcttagaaacctacgaatatcttatagattagacaatacgtcctagccatatatctatgtataaagctacactaggttgcctttctgtctaaatacgcttgtttttatcatggtcaagtaattgctgttatgctatgtgcctatccgcaccctttatacttacctctattgaatgcagtgcgagagctagctatgtaccctgtcacgagcattccttaagccctaaatagtattcagaaagccgtagctatatgcttgaatggtaagtcgatagtaacggcagtcctagctagtcctgctccgtaaaactatgtgggtattcacctaccgggacattgcggtcaccaaataggcgtggtagtgattaaaccacctttttataatttggcctaactcttaagcatcttatacaccctggtaaactggtggtgttgcaaagctcggtaagatggtttatgactgggcagcgctctattctcctgtggaccacaacatatatagtcatgctgaccattatcggaaggccatataatcctaaaacggtatagctcggaatacataccctatatagacattatatcgtttatggtgcccgaatcggcctgtcgaggccacccgttatatcagttggttaagctaatgaaccaaagtttgcgtaataggcccatttaattagagtaattctatattgatgcctatttcgtaccttttaccttgtacctcgcacctagcctttttggaatgggggtggactataaaggtgatagatagcccacccttttcttaatatacccgataatcctttagcatcgttgctcataagatctgtgactccggcctaagcttccttcagagtgcgtttaagcctgctctgttatctcgctgatcacttgttgcgagtctcacattaggcgcttagacttgtcattgtaagtaccttttttgatcattcccgtccatcagcttaccttgtataatacctagccgaaaccctatatcgcaaaatgagtaatgatcgaattcccgcacacttggataccctcggaagcacttaatatcaatttacaagcctagtagagtgtgatatcgatgaagcaattcggcatagtattgtagcgcttcagactgctattgattctgctctcttagagacccttgggatgcagctagatgctcggtaccagcgaacacaaaatcctaatgatctcaatgcatcagtacggtgttatcagcttgcgactaaaacgacttctgatttcgactatgcagcacgcctagattgtctagtaaaattgctcaatgctcgattctattgcctagcctaaaccctacgttgtaaaacgagtgaggatcagctttccctacgcttagacgccctcgaaagcagttctcaagctcacgatcagcctataaacctgacgggtgatgtcgatgaagcagtttggcttgactttctagcgctttaggccgctgttaatcctgcactcttacagaaccttgggatgcagctggatgctcgataccagtaaacacaaaatcctaatgaactcgatacagcagtacagtgttgttagcttgtgactaaaacgacttcttatgccgactatgtagcgcacttaaatcgtctagtgggagtattcgaatctcgattctaatacctagaccaaagccgacgtcgcgaaacgagcgatgatcagctttccctacgcttaggcgccctagaaagcagttcccatgcttagaatcagcccacaaacccgacgggtgatgttgatgaagcatttcggcttggctttctagctctttgggccgctgttgaccctgcgctcctcgagaaccttgggatgcaactgtatatacgataccatctaatagaagatatcgttgatctcaacttagcgatcgactattcttggcttgcgactaagatgattacttacgaccatcctaactataaaatgtgcctagatcttctggcgggactactcgatgctcgattctaatctacgggatttttgcctgaccttgattgagcgattcaacttacttgtactgcataaattggcaggataaatcaaaacgatttggtatggtactggttcgaactcggggaaaggcttggaagacggtttggctctagaggaactatcgttgatcttaacgatgctatttggtacctttccctagcggttaaagagatcactgaagattctgctttcctcgtcgatctcttagtcgagctcgcttttaattttaatcttcgatacgagatattggcaaagatagaagatctcgaatcggcgatttcgctatattaacgggctctttaagctaccgattatcaagatgaattacggttagattgcctgtgtaacctcggaagcgacctggaagcccgatatagacatatcggagagccctctgatctctacagagcgatcgccctagcttatattgcaatcagtataatggaggctatcagccctaactattatttgcttagggattgcttctatgagctcgggactaagctcggacttctatacgaaaaaataaatacgatagatgaccttaatgaggccattatatggtctcgtaaggcggtgggtgctattggggcacgtattgaggtttttcgccatatcgaacacttgttaacacttcgttataagagaacacactaaaccaaagattctgaagaagcagccaagtgggcagaagaagtagtcaagtgggaagaagcagtttagaaggatgggcctttgttgctagctagttttatgatccctatatggaggcgtgtttttatagatgaatataaataccacgtcggacgttaatttaagtagtaaaggtatatctctttgggctccgttggcgggtgactgcatgacgtctgaaacgctgctttatagattgaagcataccagtagatctgcgatatctcctaatctaaccccgggagtaaggtacgcattgacagggaagccccatactcatggaaacccgcactctgtagatggctatgtccgaactaggcaccattgatgaatataaaaaaggggtaagtttatatatttcggtatcctaggataccgaaatgagatcatatgtcccttggcacgcaagccaggccatacacgggtagtcaatatcggcgtcctagcagggcatcatattaaaacatatactttagcggctaataacctattattgaccaacaaagcaccaggacccttaagcatttacgtaggtaacgctacgccaaaatggctcagtagaagagggaactatagagtttgcgaatgggttagaaagttagtatacgatttgtagggttggccttccattcgtttaggttcgcgagagcttcctcagtgaccgcttcagtactaaaaggtcgccataccttaagcgcaatagattctgtggcgggggattccccctacttttagacatcttatagtaagaacttctcggaaaacttgcctataatcagcaaatggactatagccttattaagggcgggataagattttacggtaggagggttcctatatagggcgtatgcaatcatagtatccagtaggaagcgggaattgtttctatatacctattagttgagaggggatgatactatactaaaagaattctcacatttttttgcctacttctttactataccgaataagaaagctagggctaaagtagtatatacactactactactaatacttactgattttcttcttattatagaaagatttatacagttttcttttcttaactggtattaggcctcttgagttataaagtgtactgataacatttctttttagagtagtctctactgtaccctattgacatttacactcaatttctctaataaaaaaaagaaatagagaatatcgagcaatatgtagctttatattatatatattattcttattatataggtatattaaataggttataagactagtacaattgggcttttaagtagtatttaaggagcttaagttattctaggaagggccgctctagaaaccagagaccttctagatataggagtactgttctaaaaaggtagcgaggttatatgaatgaaggcgttcgccggtatgctagacttccgttagctattataaagttagttaggaatataccgattctagaatattaggttcatttggtttacaatctttaattactatacctggttgctccggctcctctagttactctagctcctctggttgctctagttcctctggttactctagctcctccggttactccggctcctctggttactctggctcctccggttacttaggctcctctaattacttaagggtaaggtagggcctaaggttcctagaggattagtctaattaagatttaatagtaagagaaagcttctacttagagcttgcctaaaaacccctaattaataagggtaagtaggatatatctaaaagcttcttaggctgcgtagataggctattattattaagtagagagatagatttagaaatacgaccttagggattcgaggttaagttaaccgaattcttatctttactcaaaaaccttatagaatcactaaaatcactaataactaagttaatatctaattccctaaagcttttattcgaaattaaataatcattagggttactaccccttatattactaggagtatagtcggcttattactatggttctaataagtattgtttaaataagtatcgtttacttgaggtaatatcgttagagctaattaaattaatagtagtaattttgtccttattgggaatatctttaactattagctagggtctcgataaagattatcggaagtatttaggtattatacctcttaatttaatttcctctagtattacttttattaacctctctaatcgcctaattattagacttattaggttgactaaacgaatatatatcttattctttatatattagatacctaaggtttttaaagatctaggctaagttaaggtatattagtggttattgtctaaatcgatagtagagttataagaagttatatctaagttatttaataagtttatatttaggctatctgggagatacttatcgaaattattaggaaaagattgattataggtatcgatagatatatctagaaaataaaggtaaattaagttaaatcctcgagatattgtatttctaggcttctttaccagataagttttagtcgttcagttagaccaccctatctaataatactataagatagccttaatttaggctactatctagggccgataaagaaaattgtctagagctattatactttaccttataattgattaaacagtctgtattagcttaaatctacttataaaggctaataaccgtttcgataggtaatatcgactaaagtttataagagatatagactatatctagaatctataatagggttaataagcgttaggtcctaagtagagttaggcctacctctttctctaaattttctctaggtaagaagttaaagctcccttattctctatagtgattagcctaaaggaagagtcagatagtataagttctgattaggtagctagcttatattaagagaaaacttgatctaaagtattttaagggtaaaagcttctaaagaggactaaggaattcgatagtaaataataaatagatttcgagagtaaaggaattcgatagtaagtaataaacggatttcgagagcacttagagatcgctaatatactttaggggaggaggggagtaacgctaactgtaaggataaagtaggtactactctttcttagcttacccttagcttaccctctgcttaccttctacttaccctctacttacctcctctgattgtaggatttattatattcgtaaagtcgaaatatataggatagaagggtttgtataatattttataagtggctaagggtataaaaggaactttacaataatctaacaaatttaacctctatagttaaagtaaataactatattctttagtcttattataagttattaaagaaaggaaaaacgatctttataaattaattatataggattagttaaagctgttattatataactagtattatagactaataataaatattaatttatagtataattatagggcgattaaagcgcttagtaagcgcttagtaagtgcttaggaagtaaggcagaaattattcctcccggtagaaaatataaatataccctaggacctggttattagaccttatataagttatatagtactatctggtaggcttagtaggtcttatcatattatttcctaaaatagttatatatattaataaatgtactattaaggcttacttaatatattatgatttaggaccacttaataagcgacctttaactactattataactaggaactactaggtttctactccctactcgttatatataggtaactgttgagcgagataagagcttttatttgctttccctacgctacctcttattatattaaagtaaggaaatagataccctttaagaaatattattatagaaattaggtagattagttgatcctagatatatattaactattatatacgataaacttaataagtattaagtaactaggaagttaacagttcttaagggcagtgttagttcttacagtcctttccctttatatgtatatcgaatatgaagggagttactagctaagtgttttacttattcgaggaaatcatattacttaattatatatatatatataatttattaacgcccagcggctgagccgagagggcaactatcactaaactactagtacatgtatgtgcttaattatagtgtgtgtgtgtgtgtgtgtgtgtgtgtgtaattcatttacactgatccctcgtcgaaataatatatagcctaccgctactatatatatcttcctatatatatatattatataccacttcctaagcgaacttagagcctcgccgaggcctgctgtggcctctatgctatcgttgtgtttatactgcccttatagtgcgcggctttgaaaccgttataatacttcagcaaaatctaagacagcctctactatcttggtttgtgatatactgttaatcttacctcttccttcttctcctagtctatctaatagtatcgatatactattaaaagtatcgctaaccttaatttatagctctttcctcagttctcttaattataggtaatctaataatacgtagtaaacgctttcccgtttactacagatatatatatcgttatctcgaaattagaaagtctttatatatattaataaccagtagtgtctagtttataactgtatgaataagtacgcttaatttctaggtagggagccgtagagctatttagtatacttggctggtagtatattatcgatctaatatagatatataccggtgcttaagccgttctattcgttcttctattaggtatagatcccttgcctaatatatactctcttacgtaatagcaaatagtaaaacgggtgagttttacccggtacagctgtctctttagctagtaaatcggtagcgttattccctagtacttcgcagtatctgggtatctactgtagttatatcgatatactataggtcttagtattcttagctacttgtagaatggtatagataatctattatcctaacttattcctaggattctagattacttatagggctaacttgctattactaaggatagtagtagatcctacctataagtaggatattctctagtattagagagcgaccttattaataatattaatagtatataggaccctaattagcttagcggtatatactaactaccgatctataggtctaacctatacttatatactatcgattatttctagtaagttatttagtatagctactgcagtacctagatagccttctcttcctaaggtatccgagtacactataatgtccgcggttaactataccgccttagccctttctattataatctccctatctaatttaatcttaatttctaagaaggcttcttttcgctaaggtagtagtagggttagattaatcatttcgatttcctatagtctctctaagtttatggtttttaaggcttctgatagtaggaactaggcaaataatctataattgttatatcttctctaggtttaattcagggcgttctatataggatgtttttagggtagggtatatagtctagtgatagtattctatatacagtagtgtagacaaaggtgcgttagtagtatatatacctctatattaagtatagttattactactattcgaaatatagatagaacgtagataagcgccgctcattatatagtacagaggtattatagataggtcttatcttaaagcggattatactagacagtcgatatatagtcgataactagtataacgtacactttataaagctattatatttactctagacagagttattataagcccctaagcgcgatattaaccttagtagcttgtttaacggcttattgtatatattccttctactgtaacttatagtcgaagattatacctaggaatttagtagttatagatagtttaatagtattactatttataataagctggccctagctctattctttcctcttacgagtaatataaataagttcggttttctctatagtaaagtaagacctagtttactaggcctaggcttcgatctagggtatatctttagactagattttagctaggttctcttcagcgctctagctaactcgctaatagaagtagttatcgataaaggcagataccctactataaaaatcgactagctagtcgactaggtcgcagttaaagaatataaagaggataggtaagagtagagagccttatataagcctagctttatctagcgatactaccttagtctagtagttattgaacctaatacttacctagcgcccacttataaagcttataatctacttctaggctactaataggatacccttagactagaggcggatatctaggcttatcttatttaccctattaaaggctccctttaggttaaaggctactagtaagataaccttctgtctatattatacccggtcgattgtattagtaagtattaggagggcttactcggttatttgtcctagacgtcctctaaactaagtatctagtagaagactgtagtactccgcgaagaaggatagccactgggctattactacttctaataacttactaagtatattaagtagcgagattaggtagtaagctctaggtagtaagtagtctactttcctaggcttctgtaagactatgattcgtatacttctctatcgctataaatagtatcctagttcaatcgataatgtaaaaatccttataataatatttctaagatatttctagagatatttctagattaatataggtagactatccttacctagtactattatacctttagtagccctaagagatcgatagattttaatcttagagattggatgctattggatcttagttagggtataggcaggtacttcctcttatatagacgctatagataggaaaaacgagtctataaatacctaagctttctctatattattaactagctctatatcgctaaccttaagggcaggaatatagccttaggaatcttatggttttatataaatcgctgccttctataatttcccttctcctactttatctaggaactgtttctaataggatatcttagccttcttaatagtctgagtctatacctactgtgcctagtatatatcttcgaatatagctatagtgtgggtattagcttatctaatcttagcgcagctctcttactacttatattgtaggcagtttatatctttctattaggctttaaggttggtagtaaactactgtttagagtatagggaaggtcttatatcgggtatatacttattgactatattcgctattatacttataagtctctctataactgtatctagcgcctcggctaagtctagctccctaggttactcgaaaagttcctagatctcctttctaatcttctcctagtctacttagtcgtatacctttcttattttactagtagggttatattatacttagaggtactattctgaataagtaccttagtaatctaaattatagttattgtaatagagatagtatttaaagagtaggtctaatctatttattactatctagttaattatagaacttctccctaggtagcttaacgactagaaggttgtagttccctaagggaggtagctctaaaggctataattataaaagaaattgattagttccctagtatccttaataaattgaggttaaatatggttacttccctatactaggtagtagcgattaaaatctccggctaaaataaggctaaaggttctactattatcttatataatattttaaatagtattgtagattaccgataaggtcacctctgccgatactctattaggtatatatatcggtataggcagaatatagactaagaagattaggatttaggagtcggctatctagactttaatcgctattagatctgggtaattgtatcttacttattagtaagaggaggttaagagtttgcaattaatatagataaggctttagtatcgaactgaatcgctttctactataggttaatagagtcgctatacgctatagtttatatatattcggtaggcagtgattgacagttcttagataaggagtatatctagtttctagctctaatagttattaataagagcttctatacctaccctcgattttatagtatttagttatagaattctaaggttattatctaatattataataggggtaccgtggctagtatcgggtatagtaagtctctagtcggatattccccgctatattccaagtagtgcactctaatacctaggggatatctttctcgcttatattagccgctatagtggctatattagggtatctctttatataaccatactagatagctgaatccttggtatcggaagtatcgtttctttttaatcttatacttttccactcttctaatatactgttaatcaattaataggctattatctagtatctattctactacctctagtaagtcgaattagatacctattaaggcaaatgttcctagttctttatctcttttctttagctaagctatatctttaatttgaaatctacggtcggtaagatcgttcttatttacaatctttttaatagctttggttttcctatttttgaggtctaacctaaaggttaggatatagtaaacggcgactccgaaatgtagctttactagtctaatatcgttacctagctcggttagctactcagtattagtatgggccgtttcggccgatacttggtttttaaatcggatcatatatctagttttggtagtactaatccctataacctatgcgtcctaagtagatagtgtcttcgacagtgccgtcctaatataggcgttcgtagctgggatagggaggtagtagccgaacgtgtctctgttattatctatacctaacgctttagtaatagatcgctaggtactgatttggatacagttcttatctttattagtttatcgctaggtctcctagggttgcggattatccgtactggctgtaacggccgcctataattgtattagggttagagtgttcctctcctttacctacgactatagcgctataatctcttcctatagcttcttattctgagtttagagctcgttctagttatctttcacttcttttagttcggtcccggtagcgcgaataagtgtggtttgctcctcaatggtgtattgcaggtatacgataatctgctaaatctctctagttatcacttgtccagtgctggttccggtattagtcagttccacgggttctggggccgcgtgggtctgctcgctttccactcgtgtatgtctcctggtccggaccgtggtcgttagtataaggttttctgttacgacgatccctgtgcctcttcgcgtggttgtggtggcaaggggctcgggagcccccgtgggtgggtccgccattcgtctggcgttagctcccgctcggcacacaacacaataatttatatcgcaatagtatcaaccacaacgtccgcgcaatagtcaaggtctctcccagctctcgaacgttacagtccgccaatttacagtggaattcgaaatcagttttaactctaaactcttacgatttaattcccggaccctaagtggagacacgctaatctaattttagctcttcccctgttaatccatgtagggctgtattgtattcactggtaaccacaatgagtcattgttatagtaccgtaatttcttgtagaaatcgatggaatccatcgtgcaaacagatcaaacaaaagagaatccgaacaatctggcaagatcttctttcattctctcatgtcttgcttgggccatttgtcacgcgcagccttcgcccacactcttttgcatcaaaaagaaggctctagtgactccatagagaacttatcctggtacgcaacttgtttctctatagctctggcctctgctatccactgcgattctcattcgttaccaagtcctaaggaaatccggtactcgggaagctgacatggaccctcccagaactgccatcgtactgtagagatgacacagagcccatatcatgacgatttcatcccccatcccgaagatcctgtaacatgggaaaacaactcacagtacgctccaatacctggatattgcggtagtcccaatgcaacacggttcaactacagtccctccccctctgttgtgctagaagatcagtcactatcagatattcttaggctgctctagttgtctgaatgggaagaaggaagagtatacgacaaggacccgccgacctatatacactaccgtatagagtggcgtgttacagtcaacaatcgagaggtgtcaatggacacggaggaagatcttgttttggcacctagcgccttctggcagctgtgcttagagaaaaagttagagaaagttcttcgacgaaaaattgcccgtcatcgtccggtgagagctgatgacactgcgattgtcgttttagtgactgaccgaacccaacgcaattcgactaaacgattttgatgctgataccatttgtacccccatcgagtagcagttttcggtgtggtcaggtttatttctccttgtgtaaattacccacactgaagattagtgttaattacgtagacgatcgtcactatcctccagccgttggtcgaatggagagaaaagagaaaaatcctctgtcgcagagaaaatgctcgaagagagagccgctcagcttaatgctgagtaggatgcttctggagaaagacttatataacgcagcgtctataacctgatgcggtgcgtatcctcgacttgcccattaggcccatattgttgttgggtggatccactgggaaaaaggcattaccaactaaagactcgtcatagcgagcggctcgttacccgcgtcgaaaaaggtggggtgttaggcggatacaaagatttgccagaaacagtatgcgaagaatcataaacggaagagcaacagagacaggaaaagaacaatcgcaaaggaggacatgtgactggaaatggagcaccgtatcctaccatcaacatcaatatcttaccctcgcagtcttccacctctgcggctgcataggtttctgctgacttccagtccatgcaatatccaggcccgcttgagatccctggacctagggatgaaatatccaaggaatatagcgaatgtcaagtgtcaaatgtcattgatgacactctcaaggctgcatttcaagatatctgtgacatgatgatcgacaatggtcctgaacttgagcaggtctacaaggatcaagaccaagaactctttattggaagaagcataaagatactatacttccagaaatcggtgtcactatctacactgtttcatcatttctccctgacgccaagatgcgcagggctatatttgagggactactggaatattgatattcaaatatgtatgaatactatttgctacgatcgtgtttttcacagcagcttcttgtaagaagtataaggaatctgtgcctacttctcaatacaactccggatactgcagttgctcatacattagaaacaggccacaaagtaatgatttgtatttagcactatttagtagaactcttaggctgtcggcggttatcgcgtacgtaaaccacagtaggtaaaccacttcgagagcaccgtcggctggtttcaaaaatagatgaagctgcgactaaatcactgagcttgtggtacccatatgtgcgagagtcaaagtcaggatatttgtttgtgaggagttgaccgacatcagaaagcttagcccatccatcgtcatcgcaggatgcttctaccgttgtccgcaactggtctgcgaagtgtttatcttcgggagcttgtttagttgctgatgaattctcaggtgcgatcacactatcagcatgaggtagaagctcatcaagatgtacgaggttttcagtgtagataaatttatcgcaagcagcaacgaaaggcttaggcgtcctctgctcgccgagtccgtacacgatgagtccggactcacgaatacgagcagctagccgggtaaagtcactatcgcttgagacaagacagaacccatcatatcggccagagtataaaagatccatcgcatcaatgatcatagctgagtcagtcgcattcttgccgtgggtatacgcgaactgctgtattggttgaatcgattgttcaaggagcttgtccttccaacccttcagagctgggctgctccagtctccataagctcttttagcatgagctgtaccatatttcgcaatttcggagagaaggtcactaagaagagaagaccgcgcgttgtccgcatcaattaggactgcgagtttggtgtcaccaatcattacggtgaaagtgtatggaataagatagtgacttcacagctacaaaatagatactttatcttcctgttgccatcacgtggataaatttattagttttgttcttataaacaaaagtcatgacgacgtatatacgttattgattattaagagtgtaagggttccacagtttggggcaagtatagcgatgagtgtttcatgcgagataacatggatttaagtatcgctggtcgcggtgaaattgtaatacttgcataggggacacaccaaatggtgaccagcctatgcgcctgaactcaacccttttaccacatccggagtcatctacgtaaaccagctgatacgattgaaaatccgataaatcatgcagataccattctcgtaaattggcatttcgctccctcgcttactgccgagtgcactttgtagaccaacctttggcaacaagggctcgtctgatgctagaggttgtgactagggtgcggaattcatcctagagggaaacagccatctcatcgaggtatatatcaaccgggcttttcagataggtgttcgcagagggcttcgatcattatactgttccgtattctgtcctgcttctaatacgatgacataactagttatgtaccgtgctttgtctgaaagcatggacgtgacagggcagtgccacctgatcccacctttataataaagaccgagaaagccgtgtaatatggttactgtaactggtaattctgtagatagtcgtactaccactcctaagggagtctcgtttcaaggagcgattgacagggaagtcacgcactaagtaccgcttgaaaacatatcctggggagcagaaaggcgaggggttctggcttagcggaaggtacttaccgggtaatattcggccgatccgagactgagtattggactctatacttacgatagttgtgcctgcagacttgtaagcttagtgcagcttcgctttaacactataccttatttgtaagggccgaggtagttgagcgactgctgccacggcctaccgttgattctcagttaattaataatagtctcttaattagattaaatgaactggtctataagatatcaaggcctacctaattgtaagttcaacaaatgttagtggaaaaacagaggtggtgatactgtagcaattaaaattcaagtgtataaaataagggccgtccgttgaaagtggtaagaatattgtttagatactgtcccctctaaaaaagaaattgggttgattgaataggattggttaaacaatatcaccctctctacctagatataaggtctgtgcattttcctaatcccgcaaaacgacaactatgtcgagtggaggcaggagatgcaaaacgtcttcggttttcgtgataaggaaatctattttctacctgttaaattagcgattttatgactcaaattcccatggtcacctatatattccaaggcgaagtgcgctccttattcatgtgcatcaacaccacccaacttattatgtgagccggaccctcgaacttgaggctttttccgatgataacaccattatgaaagccatcgtaaaggttcatttaatttcaatacctagctaagactgtcgtgtactaaccgaaaatattgcgataagcgcccaaccgctcgactaccttgaggaacgagattatccacatgactttcccagttatgctgttagacatacattccatcagcaggcctctctctgccaaactcattcgaaaatttcttatttgattcggcggctaacttcaagtatttgtagttcacctggttgacgtcagcctcagcgagagcgtgtgcaattgcagcgacgtttttgatctagttcatgattggtcagtaatgagatatatagtgccactcgaacacctacctctcgtccattcagatctaaagactccaatcgtcggagttcgtggtcctcaacaatggcagggccttgcatcgtacatgccttggacagaaaagttgaccagagttctctgcgaaactctcttgttaaattctcatactcaatgatcaaatggatccggctgagaattgcgtcatcaaactggataccccgatttgaagtcaagaaaagaattccttgataatattccagcttccggaggaaaatggtcacaaggcgattgtgggtatcgtggtaagatgtacgctgctccatgaacgcgtctgcttcgtccaagagaagcacggcattaaagtgtttggcgatcttgaatactgtttcaagctattgctcaagcgcattggaatccccgtggttgacaacaagttcgcctacagatatctggaaaaatcagtgacgccaaaatcagccgagctggatggttcataccgaatagagggggagcttgaaatactccgaggtcgcctcaaccgtgaaagtctttccgactcccggtgggccactagcacaagttaggtggggaagacttaatagcatagacgctttgccgacatacttcagaagaatgttgaacccttggccctttccatcaattacgtcgtcgaacggtaccgtcgggatcatccctaggcgggttttcgccaatgacaagaggatggtcttggtctctgaagggatcttcaggcagtcgaacgactcaggtgaccagtccacgtctctaagagcactgactgcgcactccactggaatcacattagccagacaccaaaacattgtcagccatgtcacatacagaacattttgtccttaaaactgaaacagcatagtattgggcaggagaccagtaaatccgcctcgctcagcttttgtgcatccacaccgtctcctcgcattttctccttctctcgctcacggtcctccataagcattgcaccaatgtcaatgactgaaattccatccttatctttgaccccaatgtcgcggagtgacggtcgggagtaatttggctgcatttcatggaaaaatgcggcgtctactcccactcgactgttgatattgaccttgaaagccttgcccttgttcataaagaatgcgctgccttcgcagtgtcgaacatgtgagccggccaaattccggaacttttgacccctctcgaccaaatctttccggacttgctcgtgacttggatggtggcagagagggaaggcctcaaggctctcgatcggctttgatcctcagaacttggccactcgcagaaagataccggcctcgccgaacttgaatccattataatcaagaaatcggcactcgagattcaaccacgtctcgtcattttgtgtcatctcttcgcccgcgtcgaatacggcacatcgtggctcttttgtgccaatgcatgtggtataaacatggcaaccaggcttgaaaagcgcccaaagaaggtcatatgtaatatgaccgtgctacaacattgattcgagacgctgcaaagtagaagcgtatgcgtgcttgaggtagttgataagcaagaggagatgctccgcatatgccgactcatggtctgaactgctatccatgttttccgcacatctgtcgagctctgggaggaaatgaaaaaggaaattttgctcgatctaaatccacgtcagcgtgcttcttgatgataatactgtcttatttaccgatggcttgatctccatcaggctaacggccttaatgtcgtgcagcacgtctcgcaggctatcgcgtaggccttccgacttgatgtctatgaatgacactatctccttagaagtccggtctgatcatactattagtaggttttcggtccagtatgcaaaggtcttacgtaccaacacgttcacggacaacgaatgcatactcagcgtagtcgtccaggtcattgctagtctccgttggctcgacaatcttgtatttacatgcttctttgtcccagctagacccgtgtcagctatctgaaaagtggaaggggtggttggctggtggctcatacgtttccataactgttttgaattgggattttgatgcccatttctcaaacgacttgaaatcatccggtgtggtacaaatcggactttcgagatcaatctcgtctaccgcctgagcattcccttccctctcattgctggcagaagaagaccgagcaggcttagttgccaaggagagttcagctgacgcatattcatcgtgggtgagcttgaccatcaaccgcttcagtcgacctatgtcaaggcctggtggggattggtcctgggagacaggagtgtttggaggttcttggtccgcaagatcgagcagcgcgctctcaagaaacacaccaaagagaagcatcaggtctttcaaggtggcaggaggcatagtcgactccttcgttgggctacctggtggcgtcaagccttggggacagggagaggaagatgcctttgcagtcttctgtgccaatgccatgtttgtgcggttggacgactgagaaatattggtgcagtatggggagctggtatgagtagaccaaatattggaatgccaatgatgaatggaaaggtcaacagaagcctgagaaattgctccttcttatatgttcgtccctagtcgtccatgccggtgtcttgtctttcttgtatacagatcggcgcaacagactaagtgaacttgcatgcatgtccaggggagttgattgtgcttgcggcaagctaatccaactgatttgacgtcgtcagctagagccaatgacggtcaaccccgtctatatgcacatcacagggaaagattgatgtgattcgtcctcgtctgctagctcaggtgtggtcaggtctgtccacttcaatatcactgaggggtgagaagcatattgttgggcaatatcactccactacggcagtgaaagcatgaaatgatggactgcgaaacaaagtgaaacataaacgggactaaataacacaaaatgagccatcttgtcatctgaagcaccaaaatgagactctatgagacagtgatgacatgacgtaaagaagacaaaagttggtgcaaatagtgtctactaattgttagtggggacaaaatgggacaaaatgggacaaaatgggattaagcaaaatgttcctcgtcaaattattgcggtgtacggcatcacctagtttttcattatcggcattgtctgcggtatttgactacgtcatatagaaggaggtaggtgggaaaagaagtttgaaataaaaattatatgtctttcttgaccttattgcaaatatgaaggactggtgaggatgacatgcttcttgcatccattctcgggtgacgcgaaatcacatgacttgtatttgctacccaaagggagttgggagagccctgcggtgggctcctctttattttgtagtctgtttcatcacagatccttgagtgcaccggtcttcaacaaattctactcagaaggcaatatttaaaggcaagtataccatgccactgctggttctcgagttgatcactctgaaactcgctgacgcgctcgccgagaattaggtgacacgctccaatcaacctttcccacaccctaaaccaccaacgacgaccagccgaacgtcgggattatcatgaacaaaatcaatgaatctgtatttcaaaagccaagggcacaagatgataaaggcctggaagaggaagcgaaatccttgttggttagaatcctggacgttttgcgtttttcaactgcttacctttatctttgtagaatgggaagtccgtggtccttgaaacagagtatttcaacgggaaatttctagattcaagtatcgcccctgcggtcctgatacacggagacgagggagagggcgtcatccactcgcgcgttgccgagggcagcattgatatactttcaacaggccccaaaacagggagtggccagagaattcttgttctgagcgatggacgtactggcctcatgttcagaaacgtattactacgacgtttcctttctggaaacgcctgatgtctggagcatccaaagatactgaatgaaggaataactgaattccctcgatacctcgatgttaacgtttaacccgggaggcagttgaagatcgacatggatatatggaggtgtcaaattgagaagagagtatgagagctgcaggttaggcccgctaattcgaagcagctcactgacagcttgtagatgagggaaatcggcgtggtacgcatggatgaagcccatgagctgtgaagagaggaaaaatattggctcttcgtcggtcatatttactgtaaaagttccgatggaacctttgccatattagcatgttcatgaaatcatagtcatatataaacaaacctgatccctcagaaactggtagctgcgcgctgaggccgctctcagtcctatcattatctgcaatccatccgtcagcacaattccaataaagcgaagaatggagggacactaccaaattctgagagggcattttgaaattcggtggactggtcaatttggctcctttgcggtgttggctctgcaggagagacggcgtattccaccctcttctgtttgacaccccgagacttcctaaaagttctgctttttgttctctcttttgaaaaaaaaaattagtacaatgcattcagcaagtggaagaaatgctatacgttgtacatggacaagacctcctctctctctttcgtggtccagctcgtgaatgagctcaatcgttcgtgattcgaacttttgggagggtgcattgtcctgccaccaatttgcaagacgaggaaatatttccctatggtccaatgatgccagatcagtgatggatattgtgacagtaacaaggacaaacagcggcttcgctatcgagtagatgttcttgaggtgttgtcgcgccttgtcatgtctgttctgggactgccgcgataccgagagtttgattatgttatgcaaaagacaataagacgattctagtcctctctggctgttcgcatctaggaatgggctactgtcaaggatgcctttttggtggagaagagagtcgaagaaatgctcagtcaatgacatggtgtcgccagctagtgaagcacttcaggttgaagaaacaagtcaaaatacagaagcaatgggacaaattgggcgagaacctcctcctaatgtcttatcctgagctttgacctcccactaaccctcctagtctaatactggatgtgacgtggttgcagcttgctgcataagcggcacaaatttatggtcagtcgcccggtcattgcaccaaccatagcctagggaaagacagggaagcgattcctgtgagtcgctttcacctcacacgccctgccttatttctaaatatagtatatcttctgccgcctactttgccttttagcgtccattactgcccattactgctcattactacttactactgaccattattgcgtgctattgacttgcacagcctacgtcgatacataatgttcccccatttctgtacactgctgctcaccactaactaaaattgcctacctgtgtgcaattctgcacgcgactgaccattctctcctaccactgtccactgttggccgcttctctactctcaaccctcattgctcaatatattcccggatgtgcctctcgtccaatagccagccttcttaccacagacgttcctgtctacagatagtgcgtagcaatgctcatcaactcttgaaagtgcagtcctaacggtctcacatcatgcgaggctcatgattataaaagggactcttcttccttaaaatttctgatctgatacacagcaagcttctgacacagatcaaacctcttctccttacctgataaacacaaagcttctaacacggacaaggcctctgccgtaaggtatttgttctcccaggtcttttagaaagagaataaccaaccagaacagatcacgtcaacatgtgcaagagaaactacaacatagcgatgcgtgcttgccgtcataaggttgagacgcccggcagtctgattcccgatgatggatgtaacaattgtggggtagagacaggcagaaacgataacattgccagttctacctcgcattttccttgcgatgactgcaaggctaatggcctttgggcccagacagccgatggaaaatggtacgaggttgcaacaggtgggcctcagaaatttacagctgatttcaggtttccctgtcagttctcctcgtagtactcattttcacgtaatctgacgaccccttctagaattccttggcaactttaactgttcgtggatattgcacggcgaagttcgacaatttattacctgtgaaggactgatgagctaccccatcctaagtcggataatacggcagtcattctttctgcttattcttgtgctgttgtcgagtttgttgttgttttggaaggtctgccagatctatttattagtggaccaaagggcggtccgaagagcaacccgcacgaatttttgatttaggtattaactcgtatttatgatccgtaattatcatcttttttttttctgttgtgcacttttactatagagaattgattctcccctatagaggaacggccctagttaatgagagaagggctcattctgacgaatatggcatggcgagggagtatttagtcgagcctttatttgtaagacaatatcccaaggtttctccctttttcccttctctccactcttgctgtccttccctcacaacacctgtaccaaactattttgccaccacccaaacagttattacttctgtacatttttgccaaaactctgcacggctaatactacgactacatgtgttttgattcgccatgggcttccactacgcggatgctctcgaggaacatagctgggttggcggaggactcgacgcttatatctaccacgtcactccaactattgtggtgaaaactgttcgtcgcgaccgaacccctgaagaaaaggcagcggggcatcccttcctcaaggagatcgcgttttacaaacgtcttaatgagtgccaggatcgatgtccgaatattattgaatgttttctcatgctcccggactatctttttctatcatattgcacgcataaggcaatcgcccctcgcttctatgaacgccaggagcgagagacaggaacaaatggttttcatgggcgtcttattagagtcaaggaatacgaggatcctgctctcatcgctcggtggatacaacaactcacctctgctcttgagtatgtagagaaaatgggcttttgtcacaatgatctgcatgcaagcaactgtcttcttgacaggaacttcaacttaaagctcgctgattttggtcgtgccaccaccattggacagccgcttgaaggtaccttgcctccacgggccaaaccaatacttgctggaccattgaaaggcacatacggtctctgttccgccagaactgaacagtttgccgtcgggacacttctatacttcatggtatatggtcatgaaccctatgacgacgttatcctcagcgccgcggaatgggatcgccgatttggggaaatggactttccagaacttaaccgcaacgaagtttttgatggtctcatttctgcttgttggcacaatgtctatcctacaatggccttgctagcatacgacttcaaacgcaagacaaaggatatgatctggaatgcagaatacgtcttcattgactctgatgaggagacaaagacctgtgaagcattggttcgcagaggcttgctgggacctgagttagctctccgctttcagccggcctggcgaagatacctacatgctattgtgaagagaagcatgtctatttggcaatgctttctacagagaaggttctggacctggtcttggtgaacggttggggcttgtaccatttgacttgctgaggtgcttggacttatagtcttaacccgaaacaaggacatgttatcgtacggtggctgtttcattcaacttcgcgattttcaaacaagaggcggtcttatcttattctatttcgttcggcacctatcagctgggtaacagccccatagctggtcccgtccactgatcttgctggactgcctggtacacagtgaatcaaaataatgaatacatgagatcgtaagctttttcatgcttcttcaagtcgccttgtctccacaacgctagatatctagtttcccctatcctcaggccaacaagtagtcgtggcagtggctgcttaaatttgccaaggttctgttctgctgtaacgtctggcgcagggaacgtaacatccatcccacgcgcagagatcaaagcgccaaacctttttgtggaagcagaacaccctgtgctgtactcagaatgggtcagtggcaagccgctagcgatctggaattttcaaatccctctcgtccacgggacttgtcctgttccttgtgccgcttcgctggcctggccatgtccactcgtgtgcgcccatcggtctgcgtggaagattttagtagagcctgcttaagagcgtaggcgacagaaggccacacatcatatgaactggctcttcgtactacttctcttctagtccaatcattctaggtccagaccagtcttgagatagtctaaaggcgacaggacggcgatcaagtcagactgccaccctttcattggcttatcagcttgctgtgggagcgggtctctgcagcggctttcattggacgtagaaagcccgtggaaagacagtgtggttggttctcctttctccaccttagagtagctacatccaagggcattgccttcgtacttcactatttcgctggaataactggaaactatgttgtatgactgggctattcaaactatacgcaatagcttttggcgagaaagccaaattccataggctcgaacttaccgatggccgcggatctggggagtagactaccgcagcacggaggctcatctggttggaatacttgcgtggaactgtggacttggaccaccaacactcaactacattgttgaattcagtcctcggtttatttacgttgtagtttgtggtgcaagagagattggtgcaagagaaaaacgagggaatggtcaaagtgttgattaggatggtatttcctacgtggcaacctccaaagatcgccgctgtttcttgagcgtcgtgctccagtatacctgtatggaccctttactcctcccggcgaatttctgtgcaaactgtctcgtcacctccgaccaagcaagattctgtccttccctgagcttcaccaataaagatacttcttcctcggaccatagtaaaccttttctcatacaaggggtatgttgagcatcaactagttcggtatttcggcttggctggtcacagtcgtatgtgatgtctgaatcttggtttgcgatgcatcttggtacagtggcatctgtgctcaaaggtgtagaaatacaatgcgataaagcaccctcaaacaaccaggacaggaactctagccggtcttcgacgggaagggccgagaattgagcacgaacggtaggaaacgaaacgctgctgcgacgatggggccctttattggaccgggcggcaccatgttttgaatatctcttctcagcgctcgaacgtttatttattttggactggcgaccaggaaccgccgttccctttgcattttgtcgtctggattgaacaggtgggtcttgattcggagagtgggagcactccaagaggcatctgtctggacatattgcgatgttggtggtattttccgttgtttgggtctgctcaccacctggaaaggcatgatcgtcgaggattgcgggatcgatagcttcattgcctggaaggtgttgaccagcaagaacggcagggtctgagtcgcacgatccaaaaccggaagatcgatgctccgcacccagacaaacattatcgggtattgtggtggaatcgatatcttcggtgctccgtaggtcttgcatttgcaaaaggtcttcagagtcgaaagtctcagcgtgaggactagtgaaggtggtacggcccaaatcctcaggctcgtgtcgagtggtctgagcgtccgaatgtaggccgtcatccaagcaaacctccaacggcgggcgggcaggaaggggatgccggccaggtttgtgagaatgacttttttgattcttagagacggggtcgataggattggagggaggcggggtgggagtcatcgagacaggacttgggtagcggcaaatatcgagagaatctcgcagaggctgggctttgtcctggaaaggattccatggccgaaaggattccaggcgaaaactagcgtttgacatattgtgtggaacagacggctgagacagtcttcgagatgtggtggttgtgggtagtcataaaacagggagactggcagagaacagagaactagggatgggggataggggataggggacaggggatgggggacagggtgcaggggagaggagaatttgaaggggttttgaattacagttttgccatttgggtggaattgtagtctctttatagacggcggtcgccagtgaggcggaatctgccttctctccagcgtagaagatcccgaccgactcctggaatccaggccactgcatccaagacgcgggaccacaccagtttcacaaccacgggttgtagctcaccggcaaaaatcaccactactcttccttgcggacgacctttgcgatgcatgccccacactagtcgtcagcttgttctccattcggtagtacaggtgtgatcgtggtacggtttccgcagtcgcggtccggcattggccgcatgatgcatcgtcgaccgaggtcaggcgcgtgcgaggcatttttgctattggcccatatcgccgcactgtgctttcgaaattcatcgattgggtgcggagagaccggagagaccgacgatgacgacaactgggcgccacgggattcgcgacgaggcaacggagagtcgttctgcgacatcaggggctgtgcaatgtaacctccgatggggcggatggagcggggcatatggcatcgaagatagtatgccagaactttgcagatgcgatggaggtcggtgaaatgagtgacgctcaacaagcaaggcgctctagcagagaaggcgacctagatagcttcgtaacacggtgtactgtcactcctctaggaaaagagtaggagggagtatcgacacgaaaccgaacgatgcggctgcgggctggatcatcccagggattctgctcctgggcgactggatggcatggcagtccaggacggccagaacgagctgggcgtcggatggagcggcatttccggtaaaatgaaaggggcagtgcgtcgagctgaaagccaatgcgcaagcgacggtgggggcgagaaagaaagggagcagagaagggaaaagagggaaagagaagggaaagtgcgtcgacaagtcgaggggagagggccagcgggtgttatatagatgaatggcagatggccggggcggtaaaagcggccagggacggggctaaacccaaacggggggagggtgagggcgctaaacctgaaggggcagggagatggtggagacgggcaggcggtcggggacggcagaggggcggtgcaatgggagctgtttccagcccaccgctcaccgtgtcaactaatctcgtatagtagtaattaactattagaagcaccaactagtatctaaagttgatttaaatagaaattggacgtggtctaaatctgggagtaggcgatggtcggaaatgcagaagtttagtttggtccaaaatgcagaagttcgggatggtcgaaaatgcagaagttcagtttagatgacttcttctgcattttggaccaaaccgaacttctgcatttccgaccatccggttcttctgcattttcgactaaacggaacttctacagaacttttacatttccgactgtcggattataatccatttttaactatactaaattactatattttagactatattctcccttaacaagtagaagcactaactagtatctacagtattttaaaatagatatatggcgtggtcaaatttctgggagtaggcaatggtcggaaatgcagaagtttggtttggtccaaaatgcagaagttcagtttagacgacttcttctgcattttggaccaacccgaacttctgcattttcgactatcggattataatccattttaactatacccaactactatatttcagactatattctcccttaataagcagaaattatacttatatagtagtaattaactattagaagtaccaattggtatcttttttatcttaaaacagatatatggcgtggtcaaatttgtgggagtaggcgatggtcggaaatgcagaagttcggtttggtccaaaatgcagaagttcagttcagatgataacttctgcattttagaccaaagcttcccttttgggaattttcgaccaaacgctaacccgattcggaattttgaaccaaagctaccgatccagttgacaaacttcaaccccttccaaagaattaaataaaatagatagaattatacaggcatcacatataggtttatatatactatgagtttgtctaaaaaatataaaaatcataaaaatcatagaatagaggctttaatatgtgcctgtattcggctaatagactgctgagtgacagctcctgagtctctaggtgccgcgcccgatgctgctgacctgtatactatatccctggactcttgcgttgccggttcaaagtcaatcactccattccaccattccatcaagatgcgggcgctgtaagattgctcctccgagagacgcggtagtaatttctcaaagttgtcgttatccagcagtagcagccagttctccagtgcccgcttccagccacggtaactgtctgcttcttctgccgttctccgtccagtgccaaaggaccattcgaccatggccccaatggagaacttggagatatcaaccctgtcctcctcttcctcttccagctcctgctgattgagcacactctgaggactacttagtccgcctagcgtcagatctttcaagccccgcgtagagaaaaaggcaccaatcaacatatcttgggccattttctgggcgaccaaaggagaagaacccatctcactgtcgcaggcctcgctatccgtcacaaaagccaacccccttagagcagccacgaggagtgaataactggcattgctctctgtttcctttctagccgacgtactagcctcatagtcaaacgccgtctccctaaattgatccgagcccaacccacagattccgcggatgcagtgggcggcgagtagttgcgggtgagggccaagagcttcttgtccattgccgagataagatggcagctggttttgcgggggtatacctgaagtttccaggagacggttgtagaggttatatagccctttgtagaagttttcgggcgcgacgaggttgtcgtcgatgtctgcaacgaatttgtacagatttctggccattttcgatcggcgctgagaacgaagagggtggattaccctcctctcgcgattgaaattgcttgcccgtgctgttgggagcctcgcccgaaggcaccaatgggttttccccacgtatcgtgtcacttggccatggcgctatgcatccctgtcaaagattgtattcgagggttaacttttgtaaagcattagatagatagatcccgtggattaggcaactcttaaaactaagacgatccagttcagctgtgggagaagcaactgagaaacagagggcaaaaaagccgagataaaggtaaaaatatatatagcccgaagggcttgttcagacacttggtatagttttatactaggataacgtatgtaaagttcttaagaatatccgggtagtctcctacattacatgaataaattgcttaataccgtgcaatttatattacaggggcgcagatgccctacaatctacatactgtattatcctatatgccttgacacctgaatgttctgcctggccggtcacgtgttaccctgcccttgggacatgcggcggacggaaatccgcgccaatgagcattgcgggactggaagctggaggaccactctcggcctgttttaagtcgcttcaataccggtagttcctgcaatgcttacatgctgggtggtctcgggtctactgttttggaagcggaatcaaggtgatcagaaatacgaaagatttcctggaatcacgtggcatgggttgcgtacacctgacgaggctgtgtgttgcctcatgcctgcatggcctcagccttgttgcaactgaacatttgttcttatcatccccccgactgcagagaaagggtcggggtgcccacgctacattatgaatgatggctcgacgcaggctcactcatcacgagtatacagttggatggatatgtgctttgccaatcgagttgaaagcagcgtgtgcggtactcgaccaagtccatgagacgctgccttcagccgaccgcgacgacaatgtgtacacgctggggcaggtggcccagcacaacatcgtcatcacatgccttccgaagggaatatatggaacaacccaagctgcgattgtcgcgcaaaggatggagctgagcttccctaatattcaataccgactgatggtcggggttggagggggagtcccttgtcctggcgatgtccggctgggcgatgtggtgattggcgtccctggcgctaattccacggggattgtcgcttacgaccacggaaaaacaactactgctggccatctagagcagacagtgattctcaacaaacccccgttgaacatgctcaaggcagttcctcacctcggacgccgtgttcggtccgtcagtcagactctgcaatcagcgatcgcgtcagatcccataccactggcagaatttgcatgtcctgggaaagagaatgacaaactattcgaggccgagtatgaccatccggattcgagtcgaagctgctcaagctgttgcgatgaggcgaaggttttgcggagacctcaaagagaaagtgtcgagccacatatccatacaggaacaattggatccggcaatcaggtcatcaaggatgctagaacgagagattctttggccaaagcgcatggaatattatgtttcgaaatggaagcggcggggcttgtggactcgtggccttgtttggtgtttcgaggcatctgcgactattcggactcccataagcagaaacagtggcagccatatgcggccataaccgcggcagcgtgtgcaagaagcctaatgttgctattgaacggaaagccacgtgaatgttaccaaaaccatgaagaagttgatgttccactggcctattcagacgctcgaaaggaatgcgttcagatcctatcattcagcaaccctattcgacatagggaagacctacaggaacggaaaggaagaagggccaagggaacctgcgagtggatgctgaaaaataacatctttcaagagtggcgtgagggttctggaaaaaacgattccaacattctgtggcttcacggcttgccagcaagtggcaagtccatgatgacaatcttccttaccgaagccctggagaacgatccaaatatgggagatgcaggcctggtgatttatttcttctgcgattccagctcccagaatcacacttcgggaatcgctgttctgagtggtttgatctggcaattgatcaaagatcgaccaataggtcaggaagtggttaggagatggtatgaagacgataaggtgctgtttacttctttcaaccgtctgtggaaattgttcattatgttgttgaatggtgggagcgaggggaaggtttattgtgtcattgacgcccttgatgagtgcgaccgagagtcacaaaacgcgatattgagaaagtttgagaactttttcgacccagagtactacgatcgatccctctcacatgtctatttcctcattacaagcagaccgtatgaggagatcagaacatacttggggggctttgtcaacgcggatatcggtgggttcgccgaggcaaaggatgatggtgctgcgttcgttgaaaactctgtggattacttgaccgagaagaagaggttttccactgagatgcaggggagagttcgtcacattattcaggaaaaagccgaagataccttcctctgggtctctttggctatggaggaagtgaaggatgctgctcgggcggatatcataggaatcctcgagcaattgcctactggactgagcagtctctatgggcaactgctcgaaagggcagcccaggctcgacccgagagcaaggaagacattcttcgtattgtcaatatcgtggcagtgtctctggaacctctcagtctcttgcaattagcctatgcctgccagttttatgcacaggaaagcgaggaagaacaggtacttgcaatgagaagctccatccacgattgcaagcttctggttgttgaaacaaacgataaagttgcattgctacataagtcagtcaaggactttcttacggacgaccggtataccagcggctctggccttcgggctgcccatgcgtttctagcgtataggtgtatcgatcgttgcatggagactgggcatcccaattgttgtttcgaaatttggcggccgcaaagatgagaaaattgacgatactagcctactcccctatgcaattcgtttctggccggagcacgcacatttcgcgggagagcagttcgagatcatcgagaaacaggtacattcttcaaagaggactctcttcagtggcaaaattggtggtcgcacctttctgcttcacaaacctacaaaagatgggcaaagccttctccatttcacattgctgcgatatggggaattctaccactcgttaagtacattctgcagaccacctcagtggacagataccacaggaccgaatatttggacaccgactttgtcacacaggagggcaagaccgctctagaactggcggcttcgtcggggcatgaaataattgtgtgccatctactagaaaatgcaccagcagagatggtaattttcaggggtgtcctagaagcagccatcaagaacacgcaacgaggggcgcaaatcatcgacgcgctccttttgcatccacgagcccgcacatcaaattggaaccatgcacacctcgtcaaagctgccaaaaaccctatatgtggtcgtgagattttacaaagtcttcttaagagggtccctaagctacggagttctttggatgacgacgtactagtagcagcggcaaggaacagcgacttggagcccatgagactgttgctcaccgttgatatggagaacacgaacttgagtgaaaaggtgttactgaaagcggttgggaacaaggcaaaggggcataacatgactcaccttctactcacgtctggaaccacaggttcaataacagagcctattataaacaaggcagcgagtaatacccgacagggactttccattctgagagttcttttgagacgatataatggaaggatttcagccaccacattgatccaggcagcgaaaattggacaagatcgtgctcatctactcctgcagcatgcctctggaatcgatataggcagcagcgatatgagagcgttccagcttctcaatccagaaactgctataaatatggtgcgaacaatctttgtcgagaatggagagccaaattttgtgaatagcagaattctctctgcttgttgtagacacctgactggtgctcaactatcgttgatcctcgggcgaagagaaaaccggctgcacattacgtcaagtctattcgcatcggcattgaaaaatgagagacactgtatcccagtgatggagagcctacgacaatactgggaaggaccaattccatttacgcggggggtcctaaacaggctcatgcggttgaatggcagctatgaagttatcaattatgtctgggagcacactgacacgggaacagccaatatatcaataggtcgctggggttgcattttcacgggagtggaaggggtcaacaatgtacaagcactgctggatcgcgacggcggagtgatgataataaggcagcgcgacctctatggggctgatcgggcgcgacatgccagcaatacctggaatcaaatcttgcaatgggccttggagcgtccgcgagacaaattgcatatcacaccgcgtgctatggagctgatactccggttctggagaaaacagacagcgcggactctattgcagcaggaccagcgccaaatatcattccatgaggaggctttgaaaatcattgtggaacggtttgatcatttcgacctgcttacagtgctgaatgggatgcaaaacccgctgactgtgacggagggtatccttattgcggcgtcaagaaacagtcgttgccacagagagatgctccgcaccctcatagacagaatgcagcaaactgtctcggtcacccctcatatcattagagcgattgcgcgagcagatgaagggtcgctcgagttgctgatgtccaaaaacgacggctgcttcgaaattaccgatgatgtggtgatggaggtatttgagaacgatcgaaatgattgcaaaatgatgcgtactcttctctcccagaacaaagagaaacgaagtataacatctcaaggtgcagttgcaattgtcggacatgtgactgtggtagagcttttgcttcgggagtatacgattgctagcctgtcaaacaacatgattgtggccgccttatccaacagtgtcaacccctctcctatacttgaaatacttctgaaacagtcgagagaatggacgtttgatgggacttggtggggctcaattactcgggcactctcgcaagatacatttcagtggctccacgccaaagtctcggataacaacgtcacccccgaatccttcctacaaggtgccttgtcaaatccacgactgagttttcagtccctttgccatcttcttgagtcagttcctgcccaggagacaatatctcaacgcttggcaggttgcagcgcgaggaaccaaacccattccggccaccttgtccagttcatattggccaggaatgatgctcaattgatcttcatcactgaagatcttgtgggaggtggtctgggaacccagaggctcggtgatgtcgctttgaaagatctcctctgtattgacagcaaccgaatcaaggttacacacagtggggtatatactatactgcgctggtatgaccagagcattgtcgattgcctgatcaagagaacgggaacagacgttcatttcacagctgatctgattcaggcgctcattttgaattcaacccatggtaaagatattatgcaatggttgctgatggaagaacatatactgctttcgctatctcaactagccttgattattgaaagtggatgtttcaatgtcgatgttctaaaacagactctgactggcccttctgtgagaatgaccgagcctctttttgatgccatcacaggggctgacgatggatattctatgatggatgcatatctcaatacacattctattggttcgattcggattacagtccctgccgttgtcaaaatgattgggacacctcaccgccacaatttgccattgctaaaactgctccttcggcaatcacggacacaggtttacgtcgcacaacctgtcattcgagctgcacttcgagcattcaatactcagaagcttgaatcgtttattgacattttaaagctattgatgacgcgaggagacaaaatctttgcagacaaagggtgcatggcagaactactcgctcacaaatatgcggaatgtttgatggtgacaatttgtgatcatacccttgaggaggagcttataatctcaaatgatatggtcaaggggttggagcactacgacgctatcaaagtactcgtgaagcgtgccaaattccaagttgtcattactgaagctgcaatgtgcaatgtagttgccagacctggttatgcgatagacattcgtctgctgatttcacggccaaactggaagatccctatcacggagatcgttctttgtgcagcactcatgaaaggccgtcgcggatcaaatcatatgccggccctatttcagcatgcgaggcacgtacagctgacatcggtatttttcaagaccctaactgaggcccaagttaccacgatggaacccgaaatggagtatatcgagagtttcttagcatttttcaagacgattcgcctagctggttgtatcagagccgacatggtggatggtattgtcgagcactgctcttttccgatcgtccttgccctgttcgacagaattgatgatcgaattccgttctccaatagtacattgccgtttctagcaagaaaattcaacgagataatcattgcaatcttcctcgatcgacacggcagtaactcgcttattaacgaggaggttcttgctgctgccgcttcaaatggcgaacatgggcctgacgtcgtcactatccttctacagcgcagccatgtccttccaaccgagagcgtcctgctggctgcagccacaaatttggggcaaggtctgaatgtctttaatattctacttgctcatttgtccgagacatcaggaaatatagtggacacagatcgaaaaaacgatgcggtcgcattggaaggtttattagcaaaggatgtcctttttgcagggctcgagacgtgctttgccgacactgtgactaaatatcgcagtcagaaaatatatttcactggcgtcactctccaggatcgggtattgcgtgtagtggctatgttgattgagtgtggagtctctgtcgtcttcaacgaagatgatctcctcaggctttttgaactctacacgctgggcccccattctcatttcatcctgcagacacacagagggaggttaccggccttcacccccaatttgatagcgagagtccgattgcgagtcacaaagtacctgtcttacaaggtgttccgttacgacccgttgtttgtacccgcaattcacctggcgatcagggatattgatcccataaccttcaactctttgatcaagaggagtgaacgtccatcccaggaggtcagcgcagtggtggagtcatgcagtcagcaatggcttgggaaacaaactgtgctccaagtgttgaattcccaggaattggaaattacaggagaaatgataataaagggagcgctcgatcaatttgacagcttcgagctgttacgacagccaaatgtcaaaataacacgtggcgcattgcaaaggatttcgcagcaccttaacccatgggacagctggggcctgttggacctgaatctaagtctgagattgttgacgaggaaacctggatcttcatggtctggaagttcaccgacctcgacctgagtcgcctcgatcccagtcttgtggactggaaagaggtgatcgaaaaagcaggccgtcgaggaatgatttcagaaagtgtgttgtcctcagtgattcgcacgaagaactatgatatggtcgacttgtgcctgaaaaattaccacaagccgctggtcgtgacacaacaactcgtggattcctttgctggttttcctcctcggtttcatctcgaaccgcgcgcacgtccagatgtgaagagcctgcgcaggttacttcaacatgggacgctcgttcaccccatccactcatctagtatcgaaagaatactcgagatattcggttctggaatcgcagatgaactcttcaaaatcaccgaaaatcggctattagttgacgaatccgtcttggtgtccatcgtatccacaaaaaacgtgaagattatcaagtcattcttcaaaagatacacggatcatctgactattacccccagggttctcattatggtcctgcagacagatgcaccaagtcatgttgaggtaacaaccaacgatgaatatggtgaaccagacgagacctcggagtgcaaccccggttggcctgaatccgacgaactctacgacagtaaatcttctgatcactcgagcgtgcttaaacctcgccaatattggtatgctgagccgcaggtgcccaatgatgaaagggacgctgagaatctgaaaatgaacgaagacacaaacacggcgtactacacctctgcgtatttacttgaatatctgctacgctactgcacatacgaccctatggggcttacgaaagatattctcctgtctgccgtggcgaatagagagtgtgaggccctttttacgattattgccaaatactacagccttgaaagcgtgagaattacgcaaaacattgcccaggctgctgcatccaacagcaagcgaaatgtgcaacttctcctggactggttcccgggaaaggtcccaattacagaggacgttcttattgcagcagcaagaaattctaaagagagctacgagactcttcggctactgttctcttgctcttcgtaccggatatcagtatccaaaaaggtcatgatagcgctgttgcagaatcccaattcttgcccttctgcctttcgacttgtgtttgaatatggaggtagcagtctactcaggagccaggaaatcaagacttcgattgttagaaatgcaggaagaggctcggttttgcagttctttctggagcttcctgggttcagcctgacagtgaccgagaacatggtccgatcgaacgaaaacgacggggaacccctaataagcagcagtcttctatttaaggaccgtagagtcaggttttcccctgcttcgattgcattcgtcatggccaagggagacgcagactccactatgtccctgttggagaagctcgccactgaccgagaagaccaccacttaacggagaatgtcttcctccatgctatatcgaatgagcaagaacgggcttggtttacggtacatcatctattgccactcataagcaagttcctcaccgagaaagcctggatcgcagctgccaaaaataaagttaacgggtggactctgatgcaaatgttcgcagattatgacccaactttagaatcaatgactcccacggtacttttgcatgctgcacgcaatgacctgctcggcaatgacattctcaaatggcttttatcttaccatccgtctaaagttcggttctctgagggcatcctggcagctatctcggggaacccgagctggtggacgggtgagcctctcaccagcgagatctatcggccccatatatggcagaatggccccatccttgaggtaatacttcatcaagcccaggagaatgcaaagatcacggagaatattcttatagctgcagtcaagaatcctacgcacagtgctcggtatctcagagtattgctccaacatcctacgagagaagtcttgaatcttcaaagggtcgcagcaatcgctgcagcccaggaatccgtggaaataaaatcacttctcagcttttttcagcacggtgctagaaccaacgaagatatagtggtagcagcaatgagaaatagtcaacgtggcggggatattttcgagctgcttcgcgtcgagaatctctggggcgacttcgttgccactgataaagtgctgtcggcagcagccgataatgcagagaacggaaatgacttgctcgaagactttctgagatcttatcagggagtcattgtgcttcaagacgagcatatcgaaaaggtcgccaactccttcagcttggatgtgatgcgtcagttgcgcattcgccagaggtttcctgtttccaacccgctacctgttttcgcttattctcactatcttttctatgtcctccatcgttggtttgtgctatattgttgagatttttagttgtttagtataacttgtagccaggactagggccaggtctcataatatagtccagcctcggctgtgatagcatggctaaagctggtgtttttcagcgaggataccttttatatctcctgataaaggcctgcaggcccgtaatattttaattttacttctataagcgaggattattactctttatttttttaatctagtaagactagtttaaaaatatatactaaaaagagtatatctattttatatctactttagagatatatatatagttattactagtaatataattaaaattaaagaggctaagccatattgagatttttattaaagagtacggcatatattaagtagcctaagtgatttaattaggagatatagtattataatagtataaattttatagctgtatatagaggtctaatcatgtctataatttctggaactccaagatcattggcagaaagccaaggtgctgaattattgtgggcacacaaacaccatgcatgagctgaccctagaactggaaacgagtaggttgaatctatgcactcttaacttgcacgaccttgttctcagtttcatcaaccaacacctgtcttctttccgtactcttctttcgaggattgggtgcatcaaagatctccgtgagttcttcgagtgtccggttattcgtttcaacagcgaagaagtagatgaatactccctgaacaatgttccagccagccagaatgatatatgtgtgccagccaatagcctcgatagcatttccaactccgaactgatttaccagcaaggcgatattagtgaagagagagtacattgccattcccttggcgcgagtctcgtatgcaagacattcaacagcgtacatggcttgcaaaggagtccatccaaagctgtaaaaagcggcgatcaagaagacaaacacaatagaagcagtggccgcgtctgtgttcaatgtttccgagtacaccccggttgtggctgcaaaactcgcaaggccgatcttcatatcgaaaaattagcggagaacattgataaaagcagagggcgggacgtatatacttaccgcgcaagcaatagacacgccaatcatcataggtctgcggcggatttttgggcccaaataacttcccagatatgctagacctgcagaaactaccgtgatgccaaggttgacgtccagcacacgctccgtatcagtaataccagctgtggctaaaagcccaccaatatagtaggttgtaacgccagcctgtgcccattggctcataaaagatgcaatagccacacacatgagtctccacctcgcggcctttgttctaacaagagacctaaagtcccatgcgttcttatcggaaccttccatgttgattgcctcttcatagtctcggatctgtagttgaacataggcattatcccggaaaccctcgccgtggtacttggcaataatatcccaggcttcctcgctgcggccatggctatagagccagcgaggtgactcgggaatgaaccaaacagacaacactataatgccggatgaaatcagctggcaccaaatggggatgcgccatgcaagagaactttcaaatctcagacatccacgacaagcgccagcagcagcaatagctccgataaaatactggcaattgtaaaagccagtcagaatatcacggtatgcagggtgactcatctcgacgacataggcaggtgcggcggagcctgccagggagtatccccaacctaagatatcctgttagcggagttattcgaatgggtagtgactaggaacataccaaggaaaaatcgactggcaagcaattgatccatgtggttggcagtgccaccaacaattgtacccagaatgacagcgcagcatccagtaaacatgccacaccgtcgaccccaagtatctaggatgattccgacaaatggcagcgcggagacacctccaatggtatacattccctgaatcaacgcggccttggaaccgactaagccagagccgaaggtttcacggaactgctctataggaagtagagcacccataagcgagccatcgaatcctggacagcagttagtggttaacttttcatagctatcgagtgtttccctcgtaccattcaatgccgagcaaagatatgccacaatcaagaataaatataactttctcatctgcacgctccacggtttcgggggatcgctccgcctggctaagtcgagagccagtgagccgtgaacagtctcaaccttgacgccctccttgacgccatccccgtgttcttggtgcgtagcatggcagtcaccttccttctccgctagttggtctggatgtgtagggtctcccatgatgctgaaaggtcttgttctccacgccgtgggaggtaatccgcaaagagtatgacccaattcaacgggaaaaggatggctgcggggtgttatttattctcacaatcatgggcttccttctctcgccctcgccgacatgaagtggtaggtttgtgacagtctccgatgcccatagcacaaccggattctgtcaaattccttgccctacgtttggccaatcacgacagtcttgtggcaatgacagttttccgggacgtgcgcgtctagatccgcaagcccacgtggacagacggcgattggccgtctttaaactttgtgggttaaaagtctgcgcaagtcttgcccggccccgattgacgcggtgccggtagccccgtgaatttctattgggcccaacatgctcattctccccgcaggactcaccccacaattcacggctccgatagacccgcggggattgttggagacccgggggtgactccatgccgagcgtacataccgacgactcttttgccgccaggtccataaaatctgtaagatagtcttaggtccttctcagaccccgacgtcatttagtctaacaatatggtataaaggacgcagggtagcaaagctggccccaactcagtcaacgaccctggagtccgaatttatttccgtcaaattcccattctaggaccatgagctctccggccaaacagctggccttgcaggccgatcccgaacggcccgatttcatgaaccccgcggtctttcgccgaaatacccttcccgcgcgttcttaccacattcctagcacatctctgcttctcaatggagcctgggagttcaacatgtcccggtcaccaccggaggcaccggagcctagcgaggatatctccgccgaggcctggtcgagcatcaatgtgccaggtcattggcagttgcagggttggggaaagccaaattatacaaacacacagttccctatccctgtgtgccccccatgtgtaccaaccgagaacccaacggggacataccgtcggaagtttcaagtgccatccgagtggaaaaccaacaacacagagattcgtttgcgattcgacggtgtcgatagcgcgtaccacatttgggtgaacaaggccttggtcgggtatgcgcaggggagcagaaacgcctctgaattcgacgtcacatcgtttttgcaggacggtgacaatgaagtctttgtgcgggtgtatcagtggtcagacgctacctatatcgaagaccaggatcagtggtggctctctggtaatacttaaatggccctaagtaacccttagtaggacagaggtatgtgctaatatggatcatgagaataggcattttccgagatgtcactttgattgcattgccagccgacgaccgcttgaatgactggtttatccgcactgaactcgattcagagtacagaaatgcgacgcttctcgcaacaattgactaccaagtctccgagccaagcgctgttgtgctcaatttgattgacccggtgcacggcagcaggagcgtcattgcttccaccgagtgtattgtggagccagcaacatctacagtggaattaagcttgcctgttgccaaccccaagaaatggagtgccgagcagccgtatctgtatgaggtggagatgctcttgacacctcgcggatccaacaagccattcactatcacacagcgcattggcttccgcaaagtcgagcgcaagggtggtctcatcaccgtcaacggaaaggccattcagcttcggggagtcaaccgacacgaccaccacccgttgttgggtcgtgccgtgccgctggacttcatgcgcagagatctacttctcatgaaagcccacaacgttaatgcgctccgctgcagccattatccccccgatcctcggcttctcgacatggccgacgagctgggcttgtgggttatggatgaagctgatcttgaatgtcatggcttctatgatgctgtctcacgcccaatggacatcgatgaatctcttggctacgaggagcgcaaggggttgacattcccgcagtgtggtgctcatacatcagacaaccccttctggcgcgaagcgtacgtggatcgagttcaatcaatgattcaacgagacaagaaccatgctagtgttattatctggtccatgggaaatgagtctttctttggcacatgtcaccggtccatggtagagtatgcccgcgctttcgacagcactcgcttgattcactacgagggagacatgcctgcggagaccactgacatgttcagctacatgtacccggagatcgaccggctgcgatccttggcagccaacgagggtgtttcgagtaatggcgagtttgagaaacctatcattctctgcgaatacggtcatgccatgggcaacggacccggcctccttacggaatacgagaaatgctttgacgagatcccgcgtctccagggtggtttcatctgggaatgggccaatcatgggttatacgttgaaggaaacagcaagaaagacggcttttatgcctacggtggtgacttcgatgactatccgaacgatggaacattcgtgatggatggtctcctgaacagtgcccatcagcctctaccgggcctgttggagctaaagagagtctatgagccagtcaagctggaagtctgtggacagcgcttggccctgaagaaccggtacaactttttggacctgaatcatctccaagcttcatacaagcttgaagcatttgacaaggagtgagtccacaactctcgtttcaataaattgaagacattctaacttttcaacctagaacaaaaaccttggcaactggatcgctagacctgcccattgtgcccgctgggcaatctgctgaaatttctctcccggaagagctattccaacacaacgtccaccccgcctacttgaccattacccttgagcagcgaggaaaggtcgaatgggatgagggaacttatgccgttgcttggacacaagctttggtatcacagccaaccgagcaagggctagtcaatggcttgggctctgctcagagcgctctctcaacaaactccaccaagacaactatatctgtcagcggagccaactggtcctttgagttcgatcgcatacgcggacatctcaggaaatggacacacaactccagatctattctcgagccgagtcccgacacagggcttgctatggtacctggtttctggcgtcctccgacagataacgacgtacctcaggcagcgccgtattggaagcgattcggtgtgaactgcctcacaaaccaattccgttctctcaacggatcaacactggaggatgggagtgtctgcatcgaaagtgagacattcatctcgcctccggttctttcttggggatggaaatgtcttgcgcgttataccatcaagcccaacggctcattatccatcaccatgaacttgcaacccacgggtgccgcaccgtcaactgttccacgggttggtctcaatcttcgtgcaaactctgatctgcaggcggcacgttggcttggacttggtcctggagaatcgtacccggacaagaagattgcgcagaagtttggtttgtggaatgttgatgacattgcgtccttgcagacggtgtatgacattccacaggagaatggaaaccgcatggatactgcctgggtagaaattctcgctcccaatggcacgggcttccgtgcaagccctcaaaaaagtacagtggtgaatgggggaacgggaagcctgagctggacagctagccagtactctgatgagactgttgaggcggcacgacacacttgtgatctcgtaaaagatgatgccgtatttgtgaggttggatgaccacgtcgcaggcgtaggaagtgcggcctgtggccccggagtcatggatgagcatctagttaaggtgcaggatctcacctttggtatggtattggagcctatatcttcgtgagaactaaaaagctagatcttggtttgttcaatagattgcagtcccatgtatactttttaactaattcacccataactttttaatctgaccagttcgtcagatttcagtcttagtccacagctataaaggttctatagaagcaaactagtacacatccctggtgtcgtaacactcggctggtataccacatgagccgtccgtctttgttggtaaagggcaatttaggatggccctatgttgtggaaacgtctctacaaggccaacataataaggatccattaattatcattagacataaatatgtaaggcctatttataccattcaattctagcgctaagaacaaacgagctttccttgtgtgaccctatactgaatacttcgtttactgtccaaacggtgaatgtttctgctttggtgactattcatgaggcagggcaaaaccatgtccctgctggttgtttcaaggctgaaagtcgctgaagtctcgggatagcaaggcttctagagagccggacggattcaaataacccccgtaaggaccgagtggttgcaatagcggcgcaatagagttccaatacgtgcttttcaggctcttctgagaggcagaagggtttgaacaagagagatctatcgctgtcagttctgcattattgaaggcaatagagttttgagatatctgaggcaggttggccaacgccggccggactcccgggacaaaggacaacgggtcgtgaactaatagagccccaattaactcttgagttctagacaccaatccgagctgtgttgagatagttcgagacacatcgagtcacattgatagtgccgtcttgtttactaagtggtatacatttcccggactttgctaaatggcttactgacaagtactatctgagaggcattcgaagggacacaggagagagatgttgttcctcctccccgcaaggagcaaagtctgcacttttgctttcgaagaacgcgtgggctttcatgatgagtctcaatgccttctccatactgggagaaacggaggatccatggatagtcatccatcgttgcaaatgctgctccaggcggggccctagatctagcaacggaatatggcgaagctgcattgtcagctgtggatgacagaagccacccatgagagtcaagatcgctgtctcgagtctaacaagataattcgttgtatcagcaacaatgcccaacagttgcgaagtcttccggaatcagacttacgagagcgaacatggccatgcgtctaccatgacagtatatggcacctgcttcaggtgcctcaatttgaataggcaagtgtcgagggcaacccgacagccatcgagcacacgcagattgttgttaagatcccacaatggattagcgagggcccactccagatatggtcgatagatgacacttcgacagctgaggtaccactgtctcaaatactcgctgtgcgggtcgtctgcaggcttgtcgtcttcggggaatcgcagacttggaggtagggtttgataccagtcgtgtagttggcgtgccagttcttggttcacggaatagaaattattggaatcaatttgaaggcccctgtcgcggtcatagagcatgtagtgggcgcggttgaggaggcgacggagtgcaatggatgctagaaagtagaagttggacttttcttcctcttcaatagcttcatgtgagtggaattttcccggaagagcaaatactgattcgatttcagtattgctgttttgcggaagggagggcaattcagagatatagttgctagtgcgagtcaggcagtgataagggtaaggtgtcattgccattgcttacctttctaatacaaagcacgaccagaatattctagtgatatgttctcggtcatcacgctcggggttgtcaagagggcaagagagcaggaaacgagaacgggtggccgcgctgttcacataagaccacgtttgcagtggcctttgcaagaaggagaagtagagactacgcattcgtcagtttcatctggacacgctgtttcggccggtaacaatgtcatcatacccagtcagcaagaggcattggcacgcttccatattcatttcaatttgggctaagtggagcatcttcattgcagcagtgaaccatgattctccttggagcttcagctgttgagacttgctttcagaactgtcctcttcgtctatcacggacgcgccgacgcagcccaaagccatgaccaacaatgcgagacacgattggcagctaggctccaaattctcttgccatatcctcaattgcagggatttcagctcgtccaagctgatggtagggaaccaaaagttatacgtccgttggaatacacctaccatatttttgacatctgacaagcccgcgctggggactatgccatagagtttgcttggaaatgacggtcgtccgtactcgagcgacaaaaatgaggactgtgcctcctccaatattgaagggtgatcactaaacatgttccacttcaaaagagactctgctgaggagagatgtcctgatgaaagcaccgcgctttcagtggggtccatagttgtgcggccccctggatgatggcgtgcatcctgagaaacccgggtaattgtcggacaggaagacgttgtatctgcctgaatgtcactcgtcacacttgaaccggagcccatagcctgaaatatgtaatcagcgagtgagaaatagcgttgcgccattcgttacatacgaccatgcccttaagttcatcaatggaagcttccatccgcaagaccgtatccaagatcatttcgcttttcccccttctgatctcatgtcaattgccgatcatcagcatggcaacaagtcacttacgatgtagcttctgttccatatgaacacatttggttcaagctcacgcagggcccacagggatcccgagcgtcacatctgtcaatcttgtcaatcgccgtgtactacaaaataacatgtgacatgactagccttgtcttgcggtggcggcatgagtcgcactgttgggttgggttgtattagtcttggtgtctcccgaggaatggggacacggaccgctcgagccgccctgaatctcttcatttcgagccaggacgctggtattaaggggattccccgtgactgaattcttgatcagcttcgacaatgagcttctattgacagcaattgagcgaattaatagtgtaggcggcgaagactcgggtggaaaagtcgcagtggcgtgaatcatgtgaccacgatagggcctctcaccctccgaatgactaatcggcatccagcactgtataaactatcgacctggtagattagatatattgaccagtatattgatcctatcctacaggttagatgctcccaattgggaatctacatgaggacttggatagctatgtagtcctctaggttgttgttcagttggtggttaggtctctacattctaacttaagcttagctgattataaagggcttatataaataaggtctagcggtacgatggcggattgacatatgtggtaggtgagaggcaacacgccgcagtggagggggccggctatgttatatttaggcccacaacgtgcaaagtgggcaagcagtaaacacgacaaaaattgagggagaaaaagaacagcagatatcttggttgttggcaggatctattacgcaggaacccattatcatacctggaaacagccagccatccataaaagttaagtagcccggccacccttgcaaaggtctcatacccaagggctttgatttgcggtcttgaaagatacatcacagatcggcttctctgtgaagaaggttgagagcaaggtgaaggttggaaggtgcgtagaagatataaacaagagttgagtggctttccaagcaagtctaccatttgaatattcaaaccatcgagagtctagtattacgtaccggctgctgtggattgtgcgattgaagctattgattggagcgaagggcagaaacaggtgcgcagcagagctggagctgtacgtcgaacgactggcggcggctagtagggatcaaagaactagctttaaataacaagttaataattaatctaggctttacaattagtatatacctggtggacactggtatgatacctggccaagtctagggctaggtctcatattatagtcagccttggccgtggcaacatgctcgtagctggcttagggctttccgcgatgatgcctttcgtatctcctgacaaggccctgcaggcacgggatgccgttgctttactcctgtaaagcaggaagctattgcccttcgtctttcgaccaggcggggcctgttcagaaaggtatggtagggcgggcaaaacagcatacctacctggtgcctattctgaaggcgtgcacatgcttaccccggcaatataattggatacctaactgctaagccacgctaagctctcgactaaagagtgattcacataccaagtagcttaagcggctgttgaccacgggacatagcatcatgatagtataaatttcatggccgcacgtgggggcctaatcatgtctgcaatttccggaactccgagatcgttagcacaaagccaatgtgctgggtattgctttctcagcaaaagagagcacgtgtgtgaagcttttcgtcgtactggatcgttgaccgtgttggcttacattggcttacggtggttcctgcgttagtggccccgtaggtatgtagtcccgcccgtgcaagtggccaagggcaaacatcgtatattctgtataattatattgtcaagcaagatgcatatataaagggcagcttgatgccatgagatgtcaagttccaagcctttcatagttatcactgcccagacggggattacactatggatctcagtcgccgcattctatgctttattttgtacggcggcctggctgtcctcgcagaagctacgctgccgggacatagtacatgtatagccagttcttcagccagcactccggtcaccgctccaactagcactacaccgtcctttccatcgacccctccacctattgtgtaccaatggctctatggccttgttgcccccgactgggacggtatgaactgctctcttcctgctgcaactgacagtgacatggaccccttggagcggtgggagcagctcaaagtcgaagatgcatggaatgctgcggtagacaattggaacaccaagggtaatgacggcggaacgcaattctcccagtcactcggctcgtttttcgaatatacggaaaccctgttttgcgagaacctagccgataatgatggctgctccaacctccaagtcaagtgtgatgagtttaaccaccctgctgggtacatgattgtactctccatgatctggcttgagcgtgtaagtcattcttactttcatgaaacaatagtgctaataaacgtactcagcaatacttgggaattaatagcgctatcaccgcgggcagtaatgctgtttccgagcagctttcggatatgcttgggacctttgcccctttgaaagaggagggtcttagtgttgacaatataatcttggatatcattagcctgggcttttccctctctatgtcaccgatgtggaataaaggtaagtctacctatactgaatgaacccttctggtgttaatcggtctcgtcaaaaagttttcaaagaatcgaaactcgttgctaccaagatgaacaacaaggatttggccaatgagctggggacagtcaaagactgggtaaacccgctggtcacacggcgttcttgtactcgcctcgaaggcactcgaagcagaagaagaagatacaggcaatcaggaacgtttcgtctcgctgcgctgtctcaggctgtattgacaccaactctcgtatggctctattgtagtgaagcagcataaattgcgcgtcggtgctgtttgccagagggcctctcccatggaggacaaaggaccgatggagagagcccaaggcgacggcgatgctcctcaaaatgggctggtggtacgccacgcgaagtagcagaacgccgatatctgcggtgaacgcctgggttgtattctggtggaagaattccagagagcgatactcatcctcgctgatgaggtccggcgactggtgggtcttccacatgcgagttggcttcgagataccggggacgtgctgtactacccggaggctatttgacgaggcaccctcaggagaccctgaatccaaaccatctccatagccatcacaccttcttcctgcattctcgcacctgcggcaagtaggtctcgtctcgtcgcatttgacgcggcgggtcctgcagtgccttatggttaatagcaagccctaacgggaggacacaccaggaactcacttgcaggtaatgcaaccattccgagacctggccgtcggcacacgatcacttggagaagccatgatcaatatccaatatcctctcgatagctttctcatgaacgcctcggtcggaaagctggtcttgtactggcgcatactctgggccgtgcatgagccgatgcactgcccccgcgtgaagcccaattgccccattgctttataccagctaaacccaccggtctttaacaggcaaatactttctgacttcatggtcttcggtccgggattccttggactttcatcaggccatgcgccgggtcctggcgggatttcccaacagcccaaaatacatgggtggataggaagcaccgtttgacaggcacggcccttacctaaatcctacaaggtagactgctagtaaaatgtgacatctggcagtgagaccaagatagaaagctcactgggctcactgtgatgtgatgttcatggctcgttggggtccgtttatcgcaaggcgcagttcatcctccacgctttgaagataaccgcaggaatcgtatcagactcaatgactgtttatttagcctataacttccagtcttgccaaacaagcctcggtatttgttccgtcggtattatgcagtcccttcggttatcagcgcacggagtacgaaaagcctgggctttggggggcgagtgttcctgtgcttgtttagttaatctatggtagcgccattaattttgagcaatatagaagggtaaataatagcgagcaacaattttacggttgaatagtgtccgtggacacatttctgcaacggacggtgtttgcgatggtcgaaatatttatcttcacatatgaataacaggccgacggatactcggcgatgtcgaaggaaagggagaatgccacgaattataaccatcatagcctcatactgttcgttcacggctatcttctagcagatgtgctgctcaccaccgccggtggtctcgaccagcggcgatcggagacaagtccgacatttaaacgccaaaatccacgggccctctgatgctcaagaaacagaatttaattggacaatccactacactagtcttctgaatcagagagtggagagctcgcccggtgttggagcgatggagccagtgctgagccagtgctgtgggggcgagatgggctgaccgagtgccagtcatcgcagaggctctcaaatgtcttcatcctcacaggcgcaatgtcgacaagccagagctctgcccagaaacgaaaaagaccgtcctcggcgtgtaaacggtgcaaggaccagcatatccgatgtgatgcggagacgaaaggactcccctgttcgccctgccggcgagtgggcaactcggattgtcaaattgcaaagacgaaaagaacacggtatgcattcaccactgtagaagcagataacgactaatatagcctgcagaggaagcaatgggcgattcgcaaccagcgacctggccaccactgagtccatagcccaacccaaccaaacgacgcgcatatcggatcgagttcccccattctcgattgacgtcgtagccctgtgcaatagccaccgccgaagatgttatttgtctggtgatggatcattgagcggccaggatcgtttgtatgcaagcacgcgccatcgtcaggcgtccgctcctcccatctggggcgagagctggtatctgtcatatgtgatccaaacgacaaacagcgaccaaggctgcttatatcggcctatacaggatgaacaaggaaacactgcggtggctcaccatccacgccgcgatcacaggtcgacaagcatatcgcagcaccttctgccccctgcgcagctagtcaatgacctgctgcgtggctacttcgttatattccacccattctgtcccatcctagaccgggaagcattcctcggttccgtgagcgatgggtcagtgtccaaggtcttgctgcgctgtgtgctttttatttcctcgatccactgcgatttgaagacgatacacctcctgggttattccggacgtatagaggcagaagacgatcttttcagctccgcaaaggccgcttttgactgcgaaccggaaggggatcgtctggtcatgcttctatgctcttatctcctccactactggtccggatctgccagccagagtagagactcgctatggtggctggctggcacgattcgttctgcacaatgcatgcagatgcatcgcaaggcccagcaaaggaatttccagccagaacaagagcgtatgtggcgacgcatctggtggttactatacgtacgtacctttacctggatcttttattgccctgctaagccatttcgaccagattcgtgatagacagatatcgatctcgctgggaaagcccatgatcatccacgactgcgactgcgatgttgaactcatcagcgagggtgatcttgtggatgaatccccagaaacaattgcatatgtactggcacaggccagactatcaatcgcaggttagagacccaaccctgcttcagaggaacatcactgacggattagtctcgaacgcactgagaacatatttcgcaccctcaagggactgttctatctcagacgggacaatcgtacttgactctatatgtagggtgttttcaacttgggaagagagcctctcgcctggtctgcaatgtcgttcgactggcaatgcccagcttcagcttattctcaatctaacttctaagtaagtggaaggtttcttaatagaaaagcactaaatgtggtcagttactatcgcataattgttcatcagaccttccagcgcacattccaagaccggcaaccaaatacgaccacggccagcaacgatataataatggatgcagccgaacggattacctctatggctgaagacgctgtcactcatcataaaggaagccacttccccatgatctggtatagtccagcgtgatacgctgccaagcatagagaaagtgactagagctgatcgaatatccagtgtatcggccatatttgcagcaatgactgcgcaattcacgcacgcaaatgccacaaaccaatctacgaccaaaaggaatgcgctactggggtccatcaagtacaaaatgctcgctttgaaggattttgaggagtgccatgtgctggcaggctggatccgccagttgttctttgacatgtttgagcaacaacgtgggcaggacaagaatggccacagtccagaggccgcaggggaggacttcaacattccaaattcagaggcactagatacagttggggacacttcgatggccctcgacgttgacagcattattgccgacataccgcgcccggccccgtgggaattgccctacacgatgtccaatgacaatatcctctggcacaattggctattggggtatcaagacgggggatgatagcttgtaccccctccctaggatatgagatggcgtatctaccactctacctgaatgataacagactaccttacagattatagcggaaagtcggtgccttgtcgcccatttcgaatatcccatccgggttctggctggccgttgcttctccacggtcgcgtttagcattgatcctccgacacaggaaatagtagaggaccacggtcaggaagcccaatgccacaaaggccagcaccagggagtgtcccaggcgatacctgggggcgtctgttttcttgtagaaattggacgccgccgcgcctcctaaactcccaagcccaatctgaatcgccattccgacagcgcgtttcgtagccggtgcgtaattgttggacgacagggctaggaggcccggtatagctagactttattaatatatcatccgtgactactgccgaagtagtagaggtacctgggtagctgccactggcagcgataaagcatcctgcgtacgtcaagcctggaatgaatcgactgggggcaacggcgatgaggaagccaacaaatacagcgccatagcagacaagcgtgaagagactcctctggcccatccggtctgagaagtagcccacagcaatgcacgctatggaggcagcggcgtagacggggatggtcagcagctgcgcgatggcggaactatatcccaggccttttataattgtcgggaggaacagcgagagtgcatacacagctaccgcctggaagaccgttaagaatgttcaagtggtttgtgcagatgtcttaccgctccccagtagctgatggcgtgcatccatgtctagagatattgtgagtgccgctgttgtattaaaagggttgataactcacttgccagtctagaactgctgccaagaattgtttccagtcgaaagcactcttctcttccagctggccttcgctagagctcgctcgcgagtccgccaacaggtcgatgatgatggccttttccctgtccgacagaaacgtcgcggtcgatggctcatcccagatcacgaagaaggccaggaccgcgcacactactgtcaggagaccttccaggataaatctgcctcggatcagcttcatatcgtggataccaagtaacagcaactcacatccatctccatccttccaaccctccgactccatccatcttgctgatggcaaaggccagaagaccggagaacgccccggccattgaggcagaggcgaagatgagggcgagtctgaactgtgcatttgctcttgggtacctgactaggtgagcgtttataccgcaatagatggactagaatataccagagagatacgtagaacgcgaggccgggaactgtagcgggtcaataacaatgaccgagagtctgaatgatggatactaacaaaggcctccctccgacaatcctgcgaagtgtcagctggatagcagaagagggatgaaaatatggacgctggtgctcaccaagaaagaacctcgccgccaatagaccggagtaattctggacaatccctagaagcgttgtgacgacacctacacactctaaatatcaaatttcaaagactctttattatgcaggcacttaccccaggccaccataatagagggcagccaaatgctgggcttgaacctgacaagcaacaggttgcaaagcggctcgaaaaaggagtatggaaagaagaaaatggtcaaacacctgggtctgttagctcagcttgagggtaatatcccggcaaatcctaccagttatactgattcccaacgagattcaagtcagtcgaaagcccttggatctcagcatttccaatgtttcctagtcgagtcagcgtagaaattcatggcgacagaaggaacaaacctcggtcaaggaagctgaggaaatacaagagcgcgaggattggaatcacacgaaggtcgatctttcgcagcagccggcgcagctcggtagggcagggttggttggcacctccaacagcgtcaaccttcggcgaaggcgcgatctcctgcgacagggtttctttctcagaatccatctcgttggctatctatctagtcagaccgagcacacgagacaacgacaggaattcacgagtcctgcagcgggcgcaggcagagtcttagccttttagcactcgggggagggccgactctctccccagccgctaggggggatacaatgtggaggcggggacagccagccactagactggcctgtgcagcgtaaagacacggctttggcgcttgcaggattggagactgcggagagaagccagcagatcaatgaattggcagtgggccttttcctgcgcctgcgccgagtctgtgctgcattgccgaccaccgccggtggtgaatctggcgatgatctgcatatcaagaaataccttgtataaatgttggccatgctggacattgcctggcatcttattcggtccaggttgtaactatctgcaacagcgggactacaaacatggccgagtacgctcggtttcccagtcttccggacaatgcaaagcatgaggacggaactccggtgctgaatcgtcattctaccttcatcacgagaggacatgacttccctgctgccaaggtactatttccacttcgcagtataccaatcgagcgtcatcttacaccaccaggctatgctgtacggcgcaggagtccccgacccagaggcaatggcaaagagcccacatgtcggcattggatccgtctggtgggagagaaacccgtgcaacatgcacctgttggacttgggaaaaacggtgaaaaaggcagtgcaggagcaggacatgatcgcctggcaatacaatacaatcggggtctcggatgggataacagtgggccacgagggtaagttgatctaacacttcactacctcgaaacatccaactagttctctgtaggaatgcgattctcgctccagtcgcgcgaaatcatcgccgatagcatcgaaaccgtcacctgcgctcaacaccacgacgcgtgcatcgccatccccggctgtgacaagaacgtccctggcgtggtgatgggaatcgccaggcacaacagaccttcggtcgtcatatacgggggatcaattcagattggcttctcgaaaacccttcgcaagcgcatcactctagggtcggctttcgaagcagccggtgcatatacatacgacaccttgcaggacttggccaccgaagacagcatcaaaggcctccacaccaatgacgagataatggacgatatcgagcaacatacctgtcccactgctggcgcctgtggggggatgtttactgcaaacaccatggccacagcgattgagtctctcggtttgagccttccgggctctgcctcaacgcctgcttcctctccttcaaaaatgagggagtgcgtaaaggcggccgaggcgatcaaggtctgtttggagaggaacatcaagccgagtgatattctaaccaagcgatcctttgaaaatgccttggtcatggtggttgcccttggaggcagtacaaacgccgttctccatctgctggccatggcacgaactgcagacatcgaccttacccttgacgatatccagagcgtgagcaacaggatcccgtacatcgccgacctcgctccaagcggaaaatactacatgccagacctgtacgaaatcggcggcatcccttccgtacaaaagttattgatagccgctgggcttctcgatggcgatatacccaccgtgactgggaagacgctggcagagaatgttgcagggttcccttcactgcctgctgatcaagttataatccgcccactgaatagtcccatcaaggaaacaggccatattcagattctgcgaggaaacattgccccaggcggctccgtggcaaagatcaccggcaaagaaggaacgcgttttgttggcaaggctatggtttttgacaaggagagacatctcaatcaggccctggataagggtgagattcctcgtggcgagaacattgtcatcgtggtgcggtatgagggtcccaaagggggcccagggatgccagagcaactcaaggcaagcgccgcaattatcggagccaagctaacaaatatagccctgataacggatggaagatattcgggggcgagccatggctttatcgtgggccatattgttccggaggctgcttctgggggtcccattgcggtggtccaaacaggcgatgtcatcacaatcgatgcgcagaaaaaccagatcagtatgaatgtttctgacgaggaaatgaaaagacggctgcacaattggaaacccccgaagcctgctataactcgtggtactttggggaaatactctcgtctggtgagtgatgcctctcacggtgcaatgacggatcttttctagacagataaacaatatacactctactatcctgtgaactggtatggatcatctaccagtaattggtattagtgttggtccgtatataattgagaatcagaatcatgttcattcgcattggctactattcatatcgaaaccacagacatcacgcagaaaggtgtacagcaacgagtgaactaataataccaaagagacaaacagcgccctaagcgagaacccatctaagcgggtcagaaggctgacggtattaggttggatgaaactacttcttaccctcaaaccccagcgccccagtcaccgagccaagtccaaggccatcgatgagcttgtcgattccaagtccgcccagcagtcccttgagaagacccccaagcccaaggccgtcaagcagcttaccaacaagaccgagtactccgctgagcaagagcccaacggcggcaatgatctggaacaagggctccgatagcagcgcccacagggggttgatcttctttttagcatggggcatgtcgctgatatactcccggcccttttcaatggtctcgacaatggtctgcgtcagctccttgagcaagtcggccagttgatactcctccggcgtggcttcgtgcgatgcactgcgagcctttgcggtagctgcaatatggccgtctggatcgagtgccctgagggagcccttgcattcttgcagcccattgcctgctttctcaatcaagggctttacgtcttttaccagctgctcctcgtcaagttcttcttttggcgtgcggctggctttttcagtgcgctatggccgtcagtatgatatcccagggtagtaaagagagacaataaggagagcttactgaggttatctccttgcaaattggcccaacagagtcgattgtctgctgcagaatggtgcacatcttctttgccagttctgcgtcttctttctccttcttctgcttctcctgctcctcaggggacagctctggctctggctctggctctggctcctctggtttgtatcgctctgcccggcctataacattgccagtcttgtcaatgacctctccatcctcgtcaacagcgcgtcccatcagtcgttgggggtcgccttcggtcagcctgccgacgacttcgcctgaagggtccatcaccataccctccttgccgactgtcaggccgtccaggccaaagaagatcccctctggcttttcacgctcatcctctgggatcagctctgcctggccaatgactttgccgttgtcactccagacctgaccgtttccatcgactttcttgccagacagcttcttcggattcccagcaacaatcctccccaggatggtgccatgctcgtcgacaacattgcccagcttgttgactgtgcccccttcaagggcggacaggtcctcctcctcttcttcctcctcagggacctcgtaccgctctgcgcggccgttgacgtttccatactgatcgaggatctcgccggagatgtcgacggtttggcctcgcaggctcttgggatcgccttccacgatcctacccaccacctcaccatccgcgtcctcaatgtatccagactctttgacagacagctctcccaggccactgaaaggacccagggattctcgctcgcccttgggaatgagctgcactttcccaatgacttctccatcatcgttcagaatttcacccttcttgttgatgcctcgaccggcaacctccttcagctcaccttcgacaacacgcgcaattggtacttggtcagggcccattacattcccatgcttatttggcttcaagccttccacagaggagaaatccacttcttctggttcaacctctggttcttcccacggctctgcgcgtccgatcgtgttgcctcgtttatccaggatatcgccatcgtcgtccaccgcgtacccaacaagtcgttttggatctccctcgaccagcttgcccacttttctcccgttctcgtcttggatccagctgtcctctgccacaaagatgtcacctaactctgaaaacaacccaggcttttcctcttcaacctctattggtttggccttgccgatgacatgtccttgattgtcccagaattgaccttcactgtcaagttggaaccctccccgtgagagcttcttggggtcgccttcgacgagctcgcctacaggagtcccgtctgctctgacaatgctgccgagtttgttgcacgtcaacccttccagcgtggagatgtcgggcaattctggttccgcacccagagatactccctctcctggttcagcctgatcttcctgctcgtcaggctcttccccctctggctgctccgccgatttaccgacggcctcttggccctggtctttcagttctcctgccttttgctggatgaggtcaactcggccgatgaggtccccatcctcgttaatgatctcgccattgtcgttgactttctgaccagcaaggtctcctgggtctccttcaacaacttcaccaatggggtttccctcgttatcaagaatctttccaccttcaccaacttcaagtccttccaggcttgatagatcttgcgcctgatcattgagttctcctgccttttgctggatgacatcaactcgaccgataagatccccatcttcgttaatgatctcgccattctcgttgactgtctgaccaacgaggtcttctgggtctccttcgacaacttcaccaatggggtttccgttgttgtccagaatctttccaccttcaccaacttcaagtccgtccaggcttgatagaccgagggcctcttgcccctgatctttgagttctcctgccttttgctggatgagatcaactcggccgatcagatctccatcgtcatcgacaatctcgccattaccattaactgtctggccgacgaggtcttctgggtctccttcaacaacttcgccaatagggttcccgttgctatccagaatctttccaccttcaccaacttcaagtccttccaggcttgatagatctagtggaactttgtctgagatatccggcgcttccggaacctcgccggcttggggcagaccggcggcctcctgcccctggtctttgagttctcctgccttttgctggatgagatcaactcgaccaataaggtccccatcttcatcaacgatctcgccattactattaactgtctgaccaacgaggccttctgggtctccttcaacaacttcgccaatagggttcccgttgctatccagaatctttccaccttcaccaacttcgagcccatctaagctggataggtctagtgggacattgtctgagatatccggcgcttccggaacctcgccagctttaggtacgtcgtcggtctggggcaggtcgtcggtaggtgccttgtctttggccgtttgagcagcatcttgaaccttctgctgattcagggtatcgtcggcttgaggtaagtccttcttattcgttgcgcccttggcagccttgagactgtcttgtggtttcttatccttcgcagcacctgctttatccttggctccttttgcgaggcgtccagatggagacgcagctgctgcctttccgcggctgggaagtgaactcagctccgagcccgacccggatgcatctgtcccaggcttctcaacctcgggcgcttgcttctgtctttgctctttgagcttcggtggtgtaggcttggcctgtttggcttgggggaccttctgtgtggcgctcttcgcgggcgccgacggggctttacccaggggtttcgctttcggacgtgctggggttgccattattttggttgtatatacaggattgcgtgttcgaaaaagggttttcttttttttatatagcacgtaagctgtcctaatgttgctttctgcgattggcacggtagtaactcgatgttttaggtatagtataccaacgcgccagcatcaaagtacggcgaatcgcgataaatatttttaaagtgatcgacaatctcccgatcatccagatctcgccatcaccatcgccatgacgatcccagtcccatcacctctgcgtcagtttgtcgcggcgccgcactggccgagccctacgacagtggctgtatgcacgccaatcggtacctaccgacgacagtatatgacaggcgcgatgacagccagaacagaaacaaccagggatccagtcgcacgcgcacagtcggtgccaccctgctgggacgaggtcataatacaggagatatacgaggagtggggggttccagacccacagagactacgcggcttgttcaaaagtcgacggattaggcaaatttaggagagcaagtctgggcgagccatgattcgggtcaagcatcgcggggaagcatcaacggcgtatagaaccgttgtggatggtggtcttagcacactgctcccagcatacggagtactggtacttgatatctattgctgacgtgggtacggtacatatagcatctgctcaaccacatctcacggaataaggaaccggcgcatcgagcgagctggatatatgcacatgatgtaaatcccacacgtcgtatgaattatcttatcgtcatgagccctgcttggtgtacacaggccgacctccaaggggttaatgctcttcatgctcaccaggccgtgcagggaccgtcacatatttgcaggaagacatcattcctcagtatattgattaggaactgcatgaaattagaaatggtctctaaaagtagaaacttgccaggccaaactcacagcaatgccaacgttaaatccccccgtatactagctttcaggtcaacctcgatgtcgaggtttaaatcaagtcgtagtttgagcccagtgtcctcttcctttccttttccctgtgcttgtcctccctgttgtgctccttgcccttgtatacgcccaaggccctgtgcctgcgacgcgtctttgttggacagctgttgcgacctgttgccttcgtatggttgcattgctttggtttcatcttgaacatcttcctcttctgaggcaatcttgggtttttgttgctgacgccgcggcctttgtcgcactttcgttggtttcgctgctttcggttggcgttggggtgcacgctcttgttcatcatctgaatggatggtgtagacatcgtcattctcgtcagcgtctccttgagctgctttaccagacatattcactgtaggactatgcgaggagcatggaatatcagcagtgttaagagaattgcaagctgtgcaactgcgcaggcgcctgtgtccgcgatttcagctcgcagtagaacggttcaatccagctgaataagatgatgctcaccccttttgcctggtaaattagtgctcaagctggctcgccactggaggtgttgtcggtacttttctgaccaagaagaccatgcgtctggccttaatcgacgaagcaatgacgccgtacccatgcaggcatcccagactgacaatataatgatgcgcgttcaatgacctgccggcctaccgaaccggtattctcatccaataccacttttcctagttgctgcagttacgtagatgtggctgagaccagtcccgaagcggcgcaggcgaatattgatagatgccagccttccacaacgtgtgtgccagtcccactgtttgtagtttgccgtttcacctatcagaaactaccggtcctgacatcaatactactgcatcaggctatcacagctgccactgctgctgggctttggtgcttgtcttggggcgaattgccaatctacgtaagtatagacatacctgaagcgtataccacagaacatccaagagctgtatcgtgctgcaaatactgcgtcccacaatgtcacagaatacaaagaataatcctacagaggatgcaccgaccgggaatgcatcccccacccccgcagccaagcgcaagccccctaagctcaggcaaaagccacccgccgaggcagcagcagacgattcgggaacaccaggaagcacaggtacccctcaacctgaaatgaacgataacgttggagacgagaagggcacaaagggagataaggcacctgcagataaccaaacgaatggggatgccccccaagacgaagcccagcaggatgcggaagatgaaagcccgggggatgacgaccccggcgaaggcacagcagaggaaaaagagcaaccggaagacgacgaagacgatcctccaccagaatcaccgccaactgaagagataggttctccagagccagaacctgagcgggaacctgatcctcccaaacgacactaccgtccgaggcggaccgtcacgcgtgagcgtgaaaggaatgcacccccagaggtctggggtaaacacgatcaggaccaatccggtcaacaactctcccgcctggctgatgttggacagaccactgaccaggttggggagcttgcacaggacgtcggtgggaaggccgtgggtgaggttggaaatactgcaggcaaggctctgggcagtgccgttggtggccagtctggcggggaagacaagggaaaggaggagcaattgagactgcgactggatctgaatctggacattgaagtccagctcaaggcgaagatacatggagatttgacgctccagctactgtgagttccgtgcatctagttgaggttgtatagctaacggtgtgtctagtaactaagcatgacggcctcggtctagtatttattctgtacttgtatccagtccgtctctactcgtatcaatgtctttttcaagtttgtgccattctacgagttggtgtctgaagggctgtgtatatagcaatctcaagcgacctatcatgaatgaatcgaatgtattcaatgagagtccgtgtacaaaacctgaccatcagcactattatcaatctgtattgagttacgtactaccagacagtaccgttctcgcctcctctctgccagtgactggaatccgttgcaccccttgtacaccctgtgggacaaggcccggatcgatcaggccaacctggcaaagcacgctcgcttgatcccagtaaacattctcagaagatattttgccaccgataaaacgtgtaatgctgataagaatgacctccacctgcttgtgtgttggggcaacgcctggtaggatccatggcatctcctggctgtgcttgaagctcatgtacagctcctcaacgactctgtctgcgcccgtggtacgggaaagaagccttaggcgcatcgaggtcggcgcgttcccaccaaagttattttcgtagaagcgacgaaggtccgttccgcccgacgcgccctgtgccgttggttgaaaggtaacagagggggtctcgtcgcctgtatagcagccgatcgaacttccgggcttggatgaaaagtatcttgctgaggaactcaccattagcgactggacagataatgtgaccaggtcaaggaacatagtatgtgaaatgcataccttcctgggcctcatcccatactgcctccaaatcaacctctctatggaatgccagctgcagcgccttcagcgaccgactccacgccaactgcgctggaatgtgattatattgtttcatgtccttctctgcgaaccctggcagagatccactgtacacatacgcctggtaccccacgctgagacgatctcctgtgcccattgccgaagtgatacgtctgacttctctttggctcttatgcgccctcccagtggacggatataccacagtgacatcctgcgcggcaaagtgaattaggacacgaactgacgatggataggcaagctctgggtcgatgatcctcgttggatagtaagctatcagtgcgcagagcttactggtattcggcgaatggagaaaatgctccaagcagaccgcggcggcctcgccgaaacctgacagaatgagcgctgcattgttaaaaggataaggagacacacttatgatggcatatgattcactgacgcttaatcccgtctttacgccctcgaggtcgtggataaaagctttcttgtccttgacaagcggaaggtatcgaacgtcaaacccttcgagactccagctgcggagaaagctactgtcaaaattgtccctgtctgcggttatgcagagacgagtagccttcttagtcgagacgaaaggtgccatttgatctaccgtatacaagtaacgttgtcgatactcccttcatggagcggctggagaatcatacaggactgccctcgacacttctcatcctcaaaccccgtaaaggaaataatgcatgacgaacatactgcagatccccttctcgaaatagcccgagtcacgttcaaagccacaagctccgactgatatcatctacgccaccaaagaccatttctgcgccggaacaggctagactgccactggagctgtccagcagaccaactcggttttggacacatgtgcctcgattattctttaatattcttgaaacctattaattaggaaatgccacgtcggtaccataaagggtgattaacgttttgtgcaaacgctggctgggtgttctcaaaccgctgggcaggggtgtggccaagccggaatcgcgaatatgacagaattccaatgctgattctcactgtctattatttctgtgccagtgaaatctacaatacctgtgagttcatatcccagactagatagatacagaggttgaatctaggtgctgggataccctcccggtgcactcaatagaaaagaatctaacaaattgatgcccgaccaagttattacaacgcgaaggtattttcaaagtaatcaataaatccattacagacccttggctacccgtaatttactttgcccgtcgaattaaagacgggaagttggagaagccatcctcctggcggattgtagcgagcgcgctcactggctgtacgtgtcctcggcctcttgaagagtcatgtccagactgttcttgttctgggtggcatcctgagcacaggttggcacagtgtcgatgataccaaaggcaagcgtgtcaacacctccctccaaagcccggagcacgtgtgcaatcggttgggtgaagggggtcaggctcagtaggccacgcttgccgatgacagtgttcaggagttcctgatgcaccatgacgaactattccagttgttagtgccgtccaatggggtgggctcgtttttgggaaatcaacatacggttctgaaagcattgcagatgccctgctgctcgctatcactgtaggcaggggggctctgtctcttctttccaacagtctggttcaaaatattagcaccttctctccaacgagacacactggcatattcatgacgaaccttgacagagcgcttgtttccaagtatttggccagggtccgcaacaatctctccaatgtcatcaacacactgctctgggtctgcaacatccaaacattcctggcgcgcccgaagagcgcgcttatctcctaggatctcactggggtcctccacgatttctccgaggtcttcaacacacttctcggggttctcaacatccaagcattcctgacgagctttgagagaccgcctggatttaccaccgttcatggaagtgatatcatcagtgactatctggattatatccttaaagtcgttgatcaattgctaaggaagaagtaagcacgaatggccttataccagcagcccttcgggacacatatacgggactgcgtaacatacagggccagtgctgaagaagtttgtgatggatatgctcttggcgatatcgttggtttccgatgacttctgggtgatctggtcgatattggcggtcatttgcgaagcactgacctgggcagaggcagaggcagccagacccagaagtgggaaaatggacttgaagtgcattctgacggtgtttatcaagggtctggtgaatcaaatgaagagactgaatcttggaggttggtgtcttcctcagaggccggatacttggggctttatatagttcttcgctgccataatttccaataccctccctctttaccctactcaacaaactgacatgagcaaacccacaatttccatcgctcgaagagatgcaaagctattgaccctgctaatgtgcggtgatgcattcgagccgctgtatatggaaagaactctgggcgatcatcgccatgaagccagacccagcgaagaggaccagcaaccatgttaacaaattggagaaagagtgctccagagctgaggctgatcatcaccgtctggtcctccctgaccagtgcatattgaaaaaggttcctgcagccgatcattgttccagcggagattaacctcgtggagctgccgcaatatgcaggcctcactggccatggcgaggcttggcctggcggggcatgaagatggttgggtctgccctgtccaccactccacatgagtcaaagcccatttgggatgtgatggcaatgcttcagtgttgtctcgtgggccctgcggagcggctatcacgtcccggtgttcctagtggcgtagatccagttcggcggcacggcgtgccttgatttttgcagtgatcgactgccaccgtatattcaagctccacgttgccttcggtcatggcattagtttactggataatatagaacgcttctttgatcatcccaccacagtcgatgtccacttcagctcgccgccacgggctggtagttcatattcctaaatatttggccatcggggtccaactcgtgtagctggctgtatcatgggggcgttatggacgtattgggcgattgttgggacgtaatcttttcaaacgctggttcacaccgcttgtattctctggggtacaattagggcttcaattcgaacagcaacggcactgccagtggagctgaatccgaccaacttaaatatatggagatcaatcagtggatgaaattatgcatggcctttccttcgctcctgtactgtgctggcaagcggagagtcgagatacaagttgagcatgacgtattgatatttatgaggagaagagtaaataagccatttatttgcattaacatactaatttccatgacggatgagagtaccccgaagcaaccgacggtggactaaaaggtagccagcttatccctcacgttgatcttagtcttgtttatctcgagatcatcgcggaacttgactccgttctggaatacgatggcgatgtccgacccgccaaataggaagtacgagattttatcccctttctgcacgcagtattccttctggacgctcatcgccacggacgagacctgggccattctgattagcaggactgcaaccttgccatggacgacagtgtcgatgatgatcaggcctcgagtctggcaccactggtagcccgcatcgtctggggcatccagcgatcgaaactcaaccttctttttgtggtgccttcgggatatctcggtctcctcacgagcgaggccccggtcagccgctagccttgcaccatctcgtttcttggttacttagaggtacacctgatcttgaatgtgcttcacttggattaccttgccgtttacaggagcgtgctggcggcggtagtcctgggacaagagaaacgtgtgcatcaggctgccattgtcgaaatccgggcctaggcgctgaagcagctcgctaacaggccacttgattcctttgctgtaatagcttggttctcaattctgacgagtgttctcctcggtgtcccatgaaccacggaaaaatggtgtcagcggcgtgcacaatgagcgaattgttatcaaccccagctatcggacgggttgatgcccgcccacgtacgcgagaagaactcattgaatgaaccacattcccggctgggcggtttatggtaaagcttgatatccttactatagataggcttgttgtaaaagggctccacatgggcagcagactccggagtattcatccagtgtcgaatctctcgtgccaaccccacgagccagtaggaatccacgacaggtccgtgttcgatgtctcgggcagcaatggcgtctggaggtttcggacagacggatgccctgaacgccgagtaaaatcaaataatactctttccatatagtttcttaatcgcataaaccggagttgttccgctgccattaatgactatttgatattagaaggtcttttattttattatttggaatgtgtaagcagccgacgcgggacgagcctcccgcagtgccaagtccgacggccactcagggcgcgccagtggggctgccgtattcggaaaggcaccacaaacaggaggtggggggcactctccaccactcagtcctcattcctgtccactgccagctcctgaatggcacgggtcggtgcggagtccaggcggcaggtcgcagaaggtcaacatccgagaccacaagtaacccgagaagccagaggatgttccccgcgtcggatatatatttccaccacatcaattaaccacaatacaaccacgttccaaatgacacagatacctccgctcaacatcgcccagtcttcccagagtgtcaatgtccatgtgatagacacgacggtgaagatcgatggccccaccgatttcttcctcaagcctcgggtgggcaacatggatcgcctagttgcaaacgcattcacgtttttaatcgagcatcccaccaccaaacagaaagtcgtctttgatctcggagtccgaaaagatgccaacgaactgtcgagccctttctggaagggctttcgggtgaactttgttatcgatgtcgaaaaggacgtcgcagacatattgcaggacaacaatatcgacctcacctcgattgatgccataatttggaggtgcgcagatactctgaccggctgtttacctttctaactatgaaaagtcatcgccacgcggaccacaccggggacccgtcaactttccccccgtgcgtcgacttgatttttgggcctggggcgccagccgccagactcccaggatatcctacgaaccaaaagagctcgctcttcgaggccgactaccagggcaggaagctggtagaaattacacaggataaattcgatctgcaaatcggtgaattccgagcctttgattactttggcgatggctctttctacctcctcgatgtccctggtcacgacatcggccacgtttgtggcctcgccaggacgactgctaacggcacgcaaacctccgaagacgacagcttcgttctcatgggtgccgacacttgccatcacgcgggtcaacttcgtccttcagagttccagccgctaccatcggagatccatccgcacccgaaggactcggaggccatgccggcgccattcgccagtacctgcttgcagaagatacaccccaagggacagttatatcacagttgtccgttttacgaagtgggcgtcttagagaatggcttcagtatgtcggagtcgcctgaagtcaccgcgcagagcatcgaaaaaatgttgccattcgacgccgcacctaatgtgctgcttatccttgcacacgacgtaactctacaggacaccgttaatcttttcccagccatggttaacggttgggaagacaccgcgttaaaggacgaaaccaggtggcggttcttgcgagattggagcactgctttcgaatgatggacgagatgtatacatattgtcttggatggtaaattcaggctgatagtggataattatccgtgattgaatgtggcttatatgttgttctaccagtatgacgaagcagagttgaataagggatgtttggtgcaccaaatattagagagcaggaactggcaacacattgttaaccctgcgaggctgatctaattatgattaaagataacgtcgttttggtagcaacaaaaagcagttcctttttgctcaagattcccagttcaaaccattcgcagatccatgacctcaaatcgccgactatcgctgctcaaacgtaaactggacctgagggacatctgagctatcaggtggcatgccgaatgtaatattccagaattcaaaattactgccaaatatcagcaaacagtgtttaagaaaaagaagtggatacttactgaatagcctcgcaagaacctcctagcaggccacagaacgatatctggggaatcggatcgacagtgccaccaacgacttcaatcttcagaccatccacatcgtcgaaaccagtaatatctctcttttgaccgagcgggttggttgcgagagcgaacgtgaatgtacttgaagagttcccaagcgggtaggtgaggttcagggtatatggagcaacatcggctttcaatgcagtctctgtgggatacaggctgaagtatccaatggactcgtcagatcttgcccactgaacgacagaagggctgaaccaggagtaggagaaatatccagacatcgagtactaaggacatctccgggttgagatccgctctggtgaccggtctccaagtcagccgcacccgtagtcgggctcctttctcgagttgagacattctcaagctcaatgtcaaatatattgcgagatgttgcagtatatcgggagtgatctttgaccggagaggtggggatggctgttgctacagcaagaggtttggagggtgtgggaggtgaaagtggaaggggaataggatggagctgaggcccggaggacacattgtataacgtccagccggatgatgacgaggcgcgcgccggaggtttaaaaggcggtggagggttgtaaaaattaatgttatcaaggtcaatatacatgacttctcaaggtttccagagggattggtaggaagatttccgagcggcttagcgcagcgggaaactgatgcgggaacaaagtaatgaaggacaacttgctggaactcgaacacaaaagcaagcatgtgtcctttatagataaaagaacagaatcatcggaagtatcacgatatcagagcaaaaccggcgctgtcgaacaagaattcgaaaacatggaagtcggtccccacgcgtaggccggaagtggcgtcaccctgccatatccggaaccaatagggaaatacacgagatagataggcagaaagcaagagatcacacgacatcagacacgcagtctgtggaaccgtcgcacttccgcggcagaaacgcacgttgcggtcgaagaccgaatgtaacgtctcccaggccagcctgccaatcgttgaaagcgttgcgttgggaggagtgttggcgatacgtggaacgggtctgccacgtcgttctccggacaatgtaggacaattaggtacatgaggcatttctgctattggcgtacgggcttttctgtcacgggcagggaatgaggaacactgccaccatctaacctcttgagatgcaaacgggcccagcgcgcagatggggaccggccgtcgaataacgctgagttggcccaaccggaatcttcatggggactgtgcacccaggatagtaggtctactgcagtgatcatctcgtgtcttccagtaggactggcgcgcccacgactcgacatcagccagcacagtagcggaatggcctggcgccgcggacgcagccagtcggggtcgccgatggaaggggaaacgagggggaggggggctgagggctcatttccgatgtgacagaaatcaggaggccagtgggccgcgcgatccgtgcaaaatatggcagcggcgagggcagtagtggacgaaagagggagggagcattgaagcgacgcaccggacgtctttatagttgtcagggagcagcgaaggcggtgtgaggcggcagttccgtttcggggatggcgttcggcactaaaccggatatgagacgcactaaaccacgtaggggccgagggagacgggcgctaaacctgaacgaggggactgccgaaaacggccgccctctggtaaatgcgaattgtccgagcaactaattaggatacctcaagtctagctactgagacggtccctgcaggcagttctagaaggtgacttctagatctagcgactatttactacttatttcctttatggtttcaagtactacttcagtaatccttctgcatactagtttaattctctagtttcaaccactagagcgctccctagcagatattctggcctatctaggatctatttggaagtaggttcgaataggaagtctaggtatcagggatataatctagttctaggtggggcctagatctagcagcggtatttaattggtatattaaatatctgaagaggaggatcccctacctgtatccagcactagcctgtatttttctggatttttttcttttttttcttgctggctttctaggcgacctagatactccaagcagtattcctattgatttaattatttaaatttaaattttgatatttatctttaaattttaaataaatagatcagtaatattgggcggaatcaatctactagctggtctgtgcagcctggttttctagaatttacccttcccaaaaattctattggtttagtagttccctgcaaaaattactatttaaaattatcagctttaaagctgttcttttaaattcccccttgttaaaatatcctgtattacccctactgtatttgaaagaggaggaatatatatatctttactatctacctgcctgcctgcctgctagttctattactttaaatctatttcttttaggtttctagtattattctagctctaggattatggattctaccctgcccccatacctagtattccatgaatcctataggtttattgcatgtcagatccatcaaactgccctacatcctaccaggatccttgatcatgtgactcaggatcaccagggtgaatctatatttctagaaaatctagaccttttacccctagagattattcatcaagaaattcaggcatggcagccagtttaacctctgaaaggtcttctaccacctaggaatgggtttcaatgttctatctgcagtcatattcgacttacagtgccgaccgctatcgccttccatatcgaacaacagatagaagctcttttgaaccctaatcacatgatacgctagtccatatttggttaagttatatttcaatatctgtttcaagtctgactcgtatgacttggaacaagtaaattacgaacttgggtatctgtacatttagtagtacagatccaaaacatcaggccaaccattaaacaggtatcatctaccgcacgggactctgagtaaattaatcgtatctttcttgcatcgtccgtccacaggatagatacattcaggcttcggttacaccaatgatttcgccgtagccttcttacgttgacgctgtgatataatgatccagtttaagtcatacagaagataaactgcagtgatgtagccattttccccgaattccattacaggcatgcaattcgtgcagacttattatttgaaaaatctagcaaatttcttaatagcccgccgtgccgtactagcgttgagatgtgcggccttctcattgtttggcagtgctcgctggtacatctctgcctctttcagcttcccttgatcggagtagagaacgccaaggttgttcactgtatccagagtggacgtatgatctggaccgagggccttctcctagcctaccagtgctcgctgatacatctcttctgcctctttcagcttcccttgatttttatagagaacgccaaggttgttcactatatccagagtggacgtatgatttagaccgagggcctcctcctggcctaccagtgctcgctggtacatctcttctgcctctttcagcttcccttgatcagagaagagatttccaaggttattgactgtgacgagagtggacgtatgatttggaccgagggccttctcgtagcctgctagtgctcgctggtacatctcttctgcctccttaagcttgccctgatcagagtaaagatcccctaaaccatggaatgcccccataactcaatattgtcaactgaccaatctagatgacatacataattggcgtgtagaagaagccgttgctaaagctctaaatagtccctattacttacactcggcacagagtatccaacagatatcagtgccagctcattaagctgaatccaatttacatttttgtttatattggcaatataaaggcaccaatcctgtaccactaggtatatcgcatagcttccttcttgttgcttactcttaagaagagagaatccgataagagactttataccgattttaaactcaagtccgcttgatatagcctttttgagccagtccgggacgtttgagctgtgacggccactcttcaccaactcgtaccagatatcacgattatcgaaataagcaagtagcaatagaaggtctactaagtttgggtcacgcttctggatctcaagatataagatcatccatatttgcagcatattgccttactggtactgacgtcccggattcgattgcagctgtagctcagaccacgattcttgatagtgttgcaaatactcagtgatgctggttccagtttcacgcataaacgccccggccagaacaatggctaatagcagtctatacagacgattagcaagagcaaggacatctacatatattagcatatcagtaacatctattcatcaagtgccacagtacctaaattgctatcaagtttactagtagtgtttcttaatgatacaccactgctttgtaggagtaattaaattgagctataagagtcaagtctacgaactgggaaaggctcccctagctcagtcagcccttaaagtcgagaagtgataaggatagagccatgatctactttagggaaaaattccgcaatatcatatccatcactaatagagctatcgaaggggtggtatcgatcgacattatcaaaaatgattagccagcgcgagttaccatccaatccaagccaccgcaacatttatctggctcgttgctctacatcctcgtcattgattatctcccggtcccagtactgttctggtaatcggttcaaggcaaagctcaacgattgcaacagcgcatcgcagtccttgccatacagccagaatatcgccataaaatcatctctgtaatctcgcgcgaagcgaatcgctagctacatctttcctattccgccaagcccgtgaagaattgcaacttttcgcgacagtgaatctgtcggttgtaaatactgccacagattgtctatctcctcttgccgtcccacaaaatttgcaatcacagacaatgcggtcaggtctagagggacattaaagcggtagactgcacacagaaatttttatttagtcatggattcgaactaggcaaggagtgatacagattgaaacttagaaacccttactatgatctgctagagtgtctcgtgctgttggagtagttttaacctgatcattcggaaccaccaagacaagttctttagcgtaggctgctgccgccactgccgcatatccttgccattccttattcttgtgtgagtcggcatagtcacaaataccccggataactaaacatggaaagtcattcataagccctgccgcttccatttccacacagtacactcccaggtcctgagccagctagtctcgccgtctaccgtctttcactacctgatttgcagacgcaatcagcccatagtgaaacactggttctttatggtctcgtggacgccttggcttcaatttggaccgatcacaaccgatacatatatcagatactccgtggtcatagtctatttcgtataaaaggtcctcttttattagtcgtgtaaaatttgcagctatacgcagcgtcattttagctcggacctcagaaatgaattcaagaattcgactttcttctgtgaaatggtgggcctagagtgtagcgagggcagtcagcaggaccttggggggccggttaagcatccctatccgctagaattgaccaccacttaatactttaccaaggtcgtattagatcacacctccagatgtgtctgttggttggctcaccacgatatcgccaagtcgaatatctgcgttgccgtttggtactcctccaccaataccgaccatcagaccgaaccggatagagtggaaactcgagagcaattgcatcgcgaccgttgcagctgatacgatgccatatgcgccacttggcaaacaggcaataacgacgttgtggtccccgatatttcccagaatatacgtattttgatccgtgggcgagcgaggcagacttgggtgtattgcgtccaacatcagctttgcggccgccatctctaggggtaaagcgcatatccacccgaccgtgtaatcctcatgggatagagtggccctggctgccataatagaatatcaaatggttggcttttagagactgagtacgctattattagttcataagaactgcgagacaaaaatgatatcgaaccccagtctcacgaatggatggatgccgtggttgttgagaggaggggcggggtcggcccccagcgagactgaggcgaagtactatcacgaccaatcattcttatacagtggagaagaaattattaacagattgcctgtttgaggaatgccatgtttgctcattttacatcgaatattccagtcacataggcttctagacccctgtaactaccatacgagtatcataaaattcgtacgatttattcctggttcggtataaaccagataatttacacactatctatatctagattagcgcatcctatatacaagttatgtgaccttcctcctattgagaacccagtaatggtctttggaatattaatcacatgataccctaatctagatatagttatagctgtatttgaggttgtcgttccaatgttgaatggtacatataatgccaaatgatagaatacaaaattgaggaagtcgtgtaggtattattacagccccaagaatactcacagcccccacgatatttcccccaaaacgactgtctccattccagcaccaacaacgccccagcccgcttcaatatggcacgaaatctcgaaaactggcaacgtcaggccattgttcatatgacacgcagcaggaagaggctgaccatttcacaaatggccaaggtggccaagtgtagtgagcgatctgtcactaacatacgcaggaacttgcggctcttcggcagcccccaatccgccttagtccctaccggtcagccatcaagcatcacgtgatgctagacgccctttgtgatcacctcgccgaaaagcccggtttatatattgatgagatggccatttttttatgggatgagttcaacatattgccatcctcatcgagcgtcaaacgtgctcttacgcgagctggctagacgaggaagaaaattcaacagaaagcgatagagcagaacactcaactaagagatttctaccagcacaaactgtccgaatatcgttcttaccacctggtcttcgttgatgaatcgggatgtgataaacgggtggggtaccggcggactggatggtcaccactgggcgtgacaccagtccaagtatctaaatttcaccggggtcaacgctatcagattctgccagcctatacacaggatggtgtcatcttgtctcgtattttcatggggtcaactgatgcgatgttcttcgaatcgtttataaagcaacttctctagcactgtggaaagtggccggaaccgaaatcggtgctcgtaatggataatgcctctttccaccattcagaccgaatcaagcagttgtgtgctgatgtaggagtcaaattgctgtacttgccgccttactcaccagatttcaaccccatcgaggaattctttgccgagctgaaggcttatatcaaaaagtcgtggtcggcgtacgaagagaagcccgaccaaggttttcatgtcttccttcggcggtgtgttcataatgttggtgcgaaacaacaaagcgcagagggtcattttcgacatacaggcataacaatagaaagggcctaagtgattctcactgtgaaaaatgtgtgcatatgttacaagtcagatagtgtgacaatacattagactaaacggtctctgtcgagaacagcgcttttccatttcgagaaaaagaccattgcgtagaatgcgcgagacaattaaccatacacataagaagaatgtgttatatactgtagtaaccaatgtatattccgttgttgtatacgccaatatctaactgcaactaccaatgtccgaagctacagtagaattcgaaatcagctttaacgccaaactcttttactctctatccccctgccccacctagatcgcgctatacctaatttgattagaagtggacctatccgattatttccaatgtacctttaggcagccgtcagaaataccgttattgaaatgtccggccaccgcttaccagatcctccccgaccctggcccagcttcccctctacctctgatgtcatcgccacaggttttaatactaatgacgagttcactttaaccaaacacgaattcgacatcctctaaacgagatatatacactgttacatccataaagccacaccgctataaatttcaaaattaatttctccttgaattaacatggtgtggcagagaaacagttactatccccatttttgtagtttaataatttttttgggggggggttttgaattaagctacatagttgtagaaataatcgattgtcgagcgagcacaagccacactgttcctaagacggccgatctcatcttcagcatgaatgggatcagcttccctcctaacattagagacttctgcgtcctcttttatcgtcgtattagctcttcggatgttttgacagctttcctgaactctgtagaggcctaattccagtgctgcgttttgaagacattccgcggatgatatcaactgacgaatgtctctatttagtctgataataaaaatcgtcagaacagtgattaaccttgacaagaaactccgggtatgtatttgcaattgactagcccaagatatattgtaccatatgaatcagggttaaggcttacagagcatgtctacctctgatgccatcgccacagactcatactcatacaacactaccctctttccactcctttgtacgataaattatcttcggtggtttattctgtgattgaaatactatcaggtatcgctgagatccataaaaaggacattgttctatttcagccgtcaccgagtatattcgcgataaatcatggaaaccgagcagctcgagcagaaccttgatatggccattttctcccaactactagagatggaccacgaagaagatcggctgaccagctcgatcgcattttatacgtttatcgaacgggcaaacaatactattgacgatatggaacatgctctgtaagccttaaccctgattcatatggtacaatatatcttgggctagtcaattgcaaatacatacccggagtttcttgtcaaggttaatcactgttctgacgatttttattatcagactaaatagagacattcgtcagttgatatcatccgcggaatgtcttcaaaacgcagcactggaattaggcctctacagagttcaggaaagctgtcaaaacatccgaagagctaatacgacgataaaagaggacgcagaagtctctaatgttaggagggaagctgatcccattcatgctgaagatgagatcggccgtcttaggaacagtgtggcttgtgctcgctcgacaatcgattatttctacaactatgtagcttaattcaaaacccccccccaaaaaaattattaaactacaaaaatggggatagtaactgtttctctgccacaccatgttaattcaaggagaaattaattttgaaatttatagcggtgtggctttatggatgtaacagtgtatatatctcgtttagaggatgtcgaattcgtgtttggttaaagtgaactcgtcattagtattaaaacctgtggcgatgacatcagagtcagaggggaagctgggccagggtcggggaggatctggtaagcggtggccggacatttcaataacggtatttctgacggctgcctaaaggtacattggaaataatcggataggtccacttctaatcaaattaggtatagcgcgatctaggtggggcaggggaacagagagtaaaagagtttggcgttaaagctgatttcgaattatactgtaatatgtatcggctgtacccatcagagctgggagagaccttgactattgcgcggacgttgtggttgatactattacgatataaattattgtgttgtgtgccgagcgggagctaacgccagacgaatggcggacctacccacgggggctcctgagccccttgccaccataaccacgcgaagaggcatagggatcgttgtaacagaaaaccttgcactaacgaccacggtccggaccaggagatatgtatgagtggaaagcaagcagacctacgcggccctggaacccgtagaactgactaatactggaactagcactagacgagtgataactagagagatttagcagattattgtacacctgtaatatactattaaggagtaaaccacacttattcacaccactgggactgaactaagagaagtgaaagataactagaacgagctctaaacttagaatgagaagctataggaagagattacagcgctacggttatagataaaggagaggaacgctctaaccttgatataattataggcggctgttacggctaatacagataatctgtaaccccgggagacctggcgataaactaataaagataagaactatatctgaatcagtacctagcgatctattactaaagtattaggcgtagataataacagagatacgttcggccgctatctccctaccctaactgcgaacgcctatattaggatagtactatcgaagacactatctacctaggatatataggttacagggattagtactactaaaattggatatataatccgatttaaaaactaagtattggccgaaacggcctacactaatactgagtggctgaccgagctaggtaatgatactagactagtaaagctacgtttcaaagtcgctgtttactatatcctaacctttagattagaccttgaaaataggaaaaccaaagccattaaaaagattgtaaataagaataatcttaccgactatagatttcgaattgaagatatagtctagctaaagaaaagagataaagaactaggaatatttgccttaataggtatctggtttaacttactagaggtagtagaatagatactagacaatagcctattaattaattaatagtatattagaagagtagaaaagtatgagattaaaaagaaataatacttctaatactaaggattcggctatctagtatagttgtataaagagataccctaatatagccactgtagcggctaatataagcgagaaagatatcccctaggtatcagagcacactacttggaatatagtagggaatatctgactagagacttgctatacctaatgctagctacagtacccctattgtaatattagataataaccttagaattctataactaaatactatgaaatcgagagtaggtatagaagctcttattaacgactatcagagccagaaactagatatactccttatctaagaactgtcgattactacctaccgaatatatataaaccacagtgtatagtaactctattaacctatagtagaaagcgatttggtttaataccgaagccttatctatattaattataaactcttaacctcctcttactaataagtaagatacaattacccagatctaatagtaattaaagtttagatagccaactcctaaatcctgatcttctcagtctatattctgcctatactaatatatacgcctaatagagtatcggcggagacgaccttatcggtaatctataatactatttaaaatgttatataagataatagtagaacctttagccttattttagctagagatttcaattactaccacctagtataggggagcaactatatttaaccttaatttattgaggacgctagggaattaattaatttcttttataattatagcctttagagctacctcccttagggaactgtaaccttctagttattaagctacctaggaagaagttctataattaactagatagtaataaacagactagacctactctttaaatactacctctactataataactatagtttagattactaaggcacttatttagaatggtacctctaagtgcaacgcaaccctactagtaagataagaaaggtatataaccgagcggactaggagaagattggaaaggagatctaggaacttttcgagtaatctagggagttagacttagccgaggcgctagatacagttatagagagacttataagtacgatagtaaatatagtcgataagtatatatctaatataagaccttccctatactctaaatagtagtttactactaaccttaaagcctaataaaaagatataaaccgcctataacgtaagtggcaagagagctatactaagatcagataagctaatatccacactatagctatattcgaagatatatactagatatagcgggtatagacttagactattaagaaggctaagatatcctattaaaaatagttcctagataaagtaggagaagggaaattatagaaggtagtaacttatataaaactacgagattcctagggctatattcctacccttaaggttggcgatatagagctagttaataatatagagaaagcttaggtatttatagactcgtttttcctatctatagtatctatataagaggaagtacctacctataccctaactgagatctagtggtatctaatctctgagattaaaatctatcgatctcttagggctgctaaaggtataatagtactaggtaaggacagtctacttacgttaatctagaaatatctctagaaatatctcggaaatattattataaggatttttatattatcgattgaactaggatattacctacagtaatagagaagtgcgcgaattatagtcttatagaagcctaggaaagtagactacttgttacctagagcttaccgcctaatctcgctacttaatatacttagtaagttattagaagcagtaatagcttagtggctatccttcttcgtagagtactatagtcttctaccggatacttagtttagaggatatctaggacgaataaccgagtaagccctcctaatacttactaatataatcgaccagatatgatatagatagaaggtcgtcttattaatagcctttaacctaaagggagcctttaatagggtaaataagataagcctagatatctacctctagtctaagggtatcctatcggtagcctagaagtagattgcgagctttataagtaggcgttaggtaagtattaggttcgacgactactagactaaggtagtatcgctagataaggctaggcttatataaggctctctactcttacttatcctctttacattctttaactatgacctagtcgactagccggttgattttcacagtagggtatctacctttatcgataactacttctactagcgagttagctagagcgctaaaaagaacctagctaaaatctagtctaaagatataccctagattgaagcctaggcctagcgaactaggtcctacttcgctatagagaagactgaactcatttatattacttataagaggaaagaatagagctagggctagcttattataaatagtaatactattaaactatctataaccgctaaactcctaggtataatctttaactataagctatagtagaaggaatatatataataagctgttaaacgagctactaaggttaatatcgcgcttaggggcttataataactctatctagagtaaatataatagctttacgaagcgtacattatactagttatcgactatatattaactatctagtataatctatttcgagataagacctatctacaatacctctatactatataataagtggcacttatctatatcctatctatatttcgaacggtagtaataactatacttaatatagagatatatatactactaatgtacctttatctacactactgtatatagaatactattactaaactatataccctaccttaaaaatatcctatatagaataccctaaattaagcctagagaagatataataatcatagatcgtttacctggttcctactattagaagccttaaaaaccataaacttagagagactataggaaatcgaaataattaatctaaccctactactaccttagcgaaaagaagccttcttagaaatcgagattaaatcagatagagagattgtaatagaaagggccgaggtagtatagttaaccgcagatattgtagtatatttagataccttaggaagagaaggctatctaggtaccgcagtagccgcgctaaataacttactagaaataatcgatagtatataagtataggttagacctatagattagtggttagtatataccgctaagctaattagggtcctatatgctattaatattattaataaggtcgctctctaatactagagaatatcctacttgcgggtaggatctactactatccttagtaatagtaagtcggccctataagtaatctagaatcttaggaataagttaggataatagattatctatactattctataagcagttaggaatactaagacctatagtatatcgatacgactatagtagatacccggatactacgaagtactagggaataacgctaccgatttactagctaaggaggcagctgtactaggcaaaacttacccgttttactatttactattatataagagagtatatattaggtaagggatctatgcccaatagaagaataaatagaacggctcgagtactagcgtatatctatatcagatcgacgatacactaccggctaaatatactagacggctctacggctctctacctagaaatcgagtatacttatttatacagttacgaaccggatactactagttattaatatatataaagactttctgatttcgagataacgatatatatatctatagtaaacgggaaagcgtttactatatattgttagattacctataattaagagaactgaggagagagctgtaaattaaggttagcgatacttttaatagtatatcgatactattaagtagactaggagaagaaggaagaggtaagattaacagtatattataaaccaagatagtggaggctgtcttggattttgctgaagtatcgtaacggtttcaaagccgcgcgctataagggcagtataaacacaacgatggtatagaggctacggtaggcctcggcaaggctctaagttcgcttaggaagtggtacacgatacatgtatataggaagatatatatagtagcggtaggctgcatatcgtttcgacgaggggtcagcgtaaatgaattacacacacatacacacacactgtaaattggcacttattctcttatctccctcaagtaaaccagcttactcacccccttggctcgagtggattcatgccttaggcaccaatgactttaacatgcttttggccgtttggtaggctgacgttcagaggtcctttagtactggtgaaagttctccggtcccctccgagggctcggaatggaggtgattcttacgagcaggttgaaatcatttcttgccagagacctggggggtgtgagggtattatgaaatgcacggatctgcgctttaggtggggaaggggctctcaactagccaatcttttcagtcctgctgactgcaatcacgtcgtatacctttgctcgccctctttaaaacgcctggtttattaaacgttcagtcaaaatttcaccgcccgctaatttccctcatgttagaagttacgttgaatgcttgttcctttaatggttttaccaaccaagctatagcaaattttcacatttaatatacaacagcggtcaagatgaccctatatatacagcccgtttattgtagtattcaagctaggagatttgccttgcttgggttcttgttgcagtaagtaacgcacccagtcagatttttgacagcgcctacagtgctggcgagtgaatcggggtgtagcgcaatccattatgcacaagtatctgtaactatcctgtctactattattaatcacgtcattcgcccagggctgaccagagccatgacaacaggagttccgttagcacgcttcagcccgtaacacgattggctctcggtggcaagtcagagtcccccccccccagttagttggcaattccggtggttgtaagctcttgcaggcagaacgctacgggtaattactaatgctaacagataagatgttggatcggaaaaacttctatccggggtttctttataatcctgtgcagcccttgaatggagtcgtccctctgcaataatcccacatttattgctatctatctcactgaaatggaattatcaatacgcccaatagcccatgtatgtttattcatagtttgttggataccatttactgacatgtctacgcaaagccacaaagtcgtgaccctcatggattttttccactagatggaaaggaccttaattccgtcacagatgaggctctggcaactcttctcacatcttctcctatcctccaccagctaggtggaacgacagttgtgcggctttcagagaccttgatcatgaagggtggcgggagtgtcatggctagtgaagcggaaatgcttcgtcttattgcttccagaaccaccattcgagccccaagagtctatcgctcatttcaggtcaaagatgatacacaatattttggtacatctgggtatattgtgatggattttatcccaggtcaaccactggatgagagctggaacagcctatcccgtgacacttaagggaaaatcgctgcgcaggttgctgaaataatccaagagatgcagtccattgagcttccacagcctggtcccactggtggaggaccatgtcggggtcggttcttcacagattatagtgcggggccttttatggacactgctgaaatggaagcttggtttaaccataagctagatatctgcaaaagtgtccatcaagccccaaaagacattccgccattccattttaccaagtttgtccttacacacaacgacatcagtcctcgaaacctgatcttagaccaacatgaacaagtgtggttgattgactgggcatattccggtgcatatcctcctgtctttgaaagcgcagcaatttcaatacagccatttttcactgatttcaatgaagcggtgttatccctcattctacgtcaccctgaggaggaaatgcaacttgattctattgcatatggattaaccaccgcggcattggcctaagggaggcttaaatggaagcggactacacccgtcacggcgaatcctattagaattagctggttggaggaaatttagttggacaacaatgacattaaaaatttgctcaatgctagaattcctcttagttgttcgcctcttaaggtcgcatatttaaaacacgtgcaattgctaattagtccacctaaaaaacaacagacttaaagtatctcattcgccccctttttccctcggggacaacaccacctagaagtggagataggagtcagggtcaatgatgtctagtttgttcccagaatagcgacactcaggccaagcaatgctggaagaacacagtactgaaattattgttagaatgaaaggcattggtcgtgaattgaacaggccatacgtgaaactatctcgggcatccgcatcaaagcaagcgaatatcatcaatgtattcaccgggacattgtggtaaccaaatgggcatagtagtgtatttccatcgccaaatgggacaataatgattcccgtgtggtacatacgcacagccgaatggcgggcaggaagatggaaagctgcttgctttagttcgtgagggatcctgaaacggcgcccagaaatgaagttgcttggaaactcatcagcagacccgatcgagccgcctacgagccgcctattcatttgtgggaaagatacaagaaaatatgtaacgaaaatctgcaacaagagatacaaatgaacggactaactaactcaagcatcaaaaataccgaaaatgaagtgaagaaaaaagaacgccgttcaacacgaaagttcctacatcccgtatgccatacccctgggagttacttgttagtccatcctcatgctcccgggattcctgctcaggaggccaagaaccgatattaagcgcatgtttttttttatcggttgaaatattttccggcggatggccccactgatcgccccaccggcacaaagcgcgtctgggaactatgctgtatgactcagaaacttatccgcatgctaagtgctttactaccatgcctaattttcacggtaaagagttcaataattcagctgtatgtaatgacagtttcttgtgggtggtgaagcctggctcaaattcaagagaagggagaccgcaaaataaaggactgtgggtaacaaagaaaagtgtgcaagatagtaaggaatggacctggtggcccgaaagaaaacaaacaagaaggaaaaatatcgggaaagtgggaaagagaaaaggtgaggctcattggtagtaagccccctggtcaaggggaagtggtgtctgatctggccacagcttgagaattcctgcttttgccgccgcaacctgggatgcgttaccgacaaactgaagttggtataaaagattaatctgattagtagtccagcatctgcacccaactcccattgcatcgaattcgtatttatgacgcccatatcgagtaaattccccccaaacttgccccactgacagtccaggggcaatatcgagaataaattgggcctgggcatcggtagatatttcgtaaggcaattctgagatgatgaggttggccttggagcctccccgaaggaccgagctcggaatagtgtagcttggctggcaatcgattcgaaccgagcttgcgggggatgacgaaaggtagaggcaccagtgattagtaccccctgccttccgatgtggaacggcgaggatgcgcttcactggtatagccaatatttgagcctggtgactggcaggcatatagtgaacgggctgaaaaccagacatagctaacgaggcaagactaaaaagacaagttagaatgaccaaactaacaatgaaacaataatacagaactcacaggatttgagagaaattgtacaatctgtacaaattagatcttgcgggcgagagaacacagatggattgtgaaggaagttgaggaaaacgcgtccttttaataaccatagattcgaaatagaggcccatgttaattgtctaaataaaactagtatacgtcgtttcatgagacgcccattgccttacccatcgaggcgggtaaattggggatgtgcacagcatttgattgacactcgactcttgaggcccgcaccacagtgagaccagaaaatgggcagcgtgacgcccgcgctacagcacttacagaggactgattttggtattacttattttagaatgcaccacagcggcggcacgagagcgggccatcggcgtcgcgcgtttttggtactagcggggacgagtcgtggtccagcgctctcaagataatattacttttctatcacacgagtcgcttcaggacatgaatttgtgttactgactttgataaacgacgaattaacagcggatcaacagcgagtcagagaccatgcctacgcgggttttatttgaggagcgcccccgcaccatttttgacatgaatatcatctgttttgactttccttgttgtatgattggaaaggtacaaggaatgcatggtgaccctgttgaagttgtgctttatgcaccaagagtttctattggatctcagccttggatctaaggaacgaaaagactaaatccaggcggacagcttaaaatgaatctcttgactctgggctttatctgtagcattttaaagatgttaaggatacttatgaggctgcgtggctacttccaatagggtggaaagaatgtatctatagagcaaatatactgaattcaacttcagattatgagagactgagaacatcatggtggggttaaattgtaggtcacgtgctccattttgttgtgcccaaccccgcctcgccaagagaagtgtaagattcgtttcgattatctcgacccaaaaaaccgcagtcgagcaatacgttgtatgcgcattcagtagcggtactagtggctgttctatgaatggacccatggcctacctccgaccggctgcgaaaaagcctaaacaggatccttgcgacaaattgaggaactggctgccataggcagaatttccagcgaaggacgatgcgcctcacatgaggctatatcgaaacgttccggtggattttcttcggcctttccaaaaggaggtatggaacttgtattactaattcccttaatattatatgcagctaaccttggccagaaaatgaaaaccagtttgatataatttgcgaacggagcctccccgcgggaaccctacagtactcttacagctatcctcctacacgaagataatgcaaatatatctcttatcaatcataacgcaaatattctactagcgagcggtgactcgatagaatggagtggattaatagaaattctgaattcgtgtatctatatagtgacctagagtaaagagactatctaacagcctcctccgtgagatttagccactgtttaggtaagggaatgcctattattagagaaaaggatagtatacaatagttaaatagagtagatagaagcgctaccgtttcttaagaagcgaaatacagtaaaacaggtatctcagatatggtattaaaggatagaagggaataagaaaatatttctatatttacaaaatccggaggacctattaaatatagatagcgtaaatctatatatttttagttattaagatattggctaagttaacgaccaacgacttacgtgagtcatctggttagatttaggaaagcgagtatactgtctaatacccctggactaaatattacggatctgaactagtaagaagaagtcgcttatctagtgctacctactataggaaacctttagggcttagattcctacttaaggaagccctctcctagtctatgggaatcagtattatattaatagatcttatttcctaggaggcttactggatagatttagaagggaataattagggtcttcgttaaaggttatctgcacttatatattaaccgataaagttaaattgaaagataggctacttatatttaaatcggtcccgctgctaagacaatgtcttttctgtgcttcgtataagaagcctgctgccggctgtaagtaccttttagtttagggttcggccctagggtcggcttcgctattaggggaaatctaatctataggaaagaagagcttttatctttccagcttatctatgatatctgaaccaaatggccctaggtactattttgcaaatgattctagagcgatatcgaaattgcagtgtagagtattatatatatctaagaatctagaagctaattataagtaaaagcgataagcgaaatggtttatatatatactgaacacttttactaaatatatatttaataatatacagaatagagagatggtttaagtgtaaacttgcttagtttttcttatattaatcttcttttaaagaggtaataaatatagatttcgatttagttactttcgcccagtaccttaataaagtaaaggtcggggtaactagattcacccgttagctctatataaaactaattagcaaagaaacctaatagtaaaataagatatcaccgcttctaatatcccaaccgctctctatttataggcagttaattgcctctaccccctaagccgctctataccgaagctcctgaaggtaatcgggtcctcctttcgaaataaatcccattatcttattcactgattttggattaatactaaggcaatatataatatggcagagtgtacctaataagaaattctaataggatacaattaatttcgcctacttcacattatccgcacattttttcgcgaacgaagtataagcctcaatggttcggatgatatccgaattccgataatagatagctgatatcgaggaatcactgtctctaaggtaattttcgctttggaataatatatctaaaacggaaactcgttagggacatactacactaggccacttttctgcagaaggaatcctattgataaaagttcgaagaggctttctctacgtttcttctaactgaggagaacctgatagagaaggccttatataccgagtcactggacggttttaaggtataggggatcggagaagatgagataaggtgatttcgagtggaatctgagatcgcacaaggacatgctgtggaacataaggtatccattctctcagtatatgctgaagatgatgaatgtgtctctctaatacagcgacgtggtaggaagcgttactagattctatctcatggacgaagtcagtcatctaaggatgacagtacgatatagaatagatggatcagcctctagagagatggcgggggaagagagccatcaccaaaattattagcaaagattaattggccgtgataggggtatgggctctcagcccatacccctgtcacagccaatcaattgcggggcagtatctgcccaggacatgagcttacatgcaagctagttcgttttccctcaccaatttgtcctctggccattatagtgacccatgtcagtgaagcccgcgtatgcaaggctagcgaaaatggattcggtacacataaatggagtgacactagtgcatttattaagccgatgcatgaccgcagtactaatctgtcgtgagtagcttacatacacataccaatggcatgaaattagattccgggaccttagagtggcgatagtatggtctgcttgagcctactttcgagcttcgtatcgcgcctctccacccccccccccccccccccccccccccccccacacccgacaacccgcgcccnnnnnnnnnnnnnnnnnnnnnnnnnnnnnnnnnnnnnnnnnnnnnnnnnnnnnnnnnnnnnnnnnnnnnnnnnnnnnnnnnnnnnnnnnnnnnnnnnnnnnnnnnnnnnnnnnnnnnnnnnnnnnnnnnnnnnnnnnnnnnnnnnnnnnnnnnnnnnnnnnnnnnnnnnnnnnngagcttcgctaccccccccccccccccccccccccccccggcagcacatgtgagacagttttatctggaggcccagattcgaatggaaagtttatgcatgaaactacgagcgacgctatgcctataatgttgaaagaatagcctacctctaccttctctgttgattcggactctggtgtctctgccgaagactctgcgccgattcgcttgcgcgtgggttaccctttcttcctcgttgacaccgagttctaaccaaacaaaactgtgcgacgttggttttttcccaaggctcctgaacttatggatgccattgcccttcaagagcttggcgctcagtgaggtgttgaaatggacaaacgttggacggtctggtatgatgcctatcttggagaaattggcagccgccttacaaagctcgcttactgttgatcaaagcaaatataatataatttatggcttgctcttgtactgatcatcggaaaggcctcaatctaagataaataaaaaggtaaagtttgaaggagccgtttcacacaaaatgcttcggtatcgatcttgaagtattccccacacttgactattatggggcggtctcaagaaaatacgcaagccctgtgatgcttcagaagatgaagcgtcaaaatgccaagtcaacagtgccagcatcaggacagcaccataactaagatgttgtaaaatatccctcacgtaaacgcgtaagtcattctcgagagaaaatccttcgtcggatcttctacttctcaaatccgtgcaaatatctagcagcatcctagcatctgggctgggattttttgaggacgtagacgtccattcccagactgacggagattcaattctcaaagagagtattgctttcaaagcaatttctgctggcccatacaggaattggacaggaatcggggtggacttctagtgttagcatatcatcgtcaccagcgaaatatgtgggtactaaccatgacgaattatttggttcaatgacaaggtgcgatcaatggtgccttagacagtagaaataggcacctttataacctgctagacttgaaacaataaacatagctgatacttgagaccttccatctctattgatgatttcacctcatattattctacaccattcgatgcctgctgttcaactgaactcatgcactgcctttcttctgcatcattctggtctctttttccgaattggatacgatccctccgcgtatcagagggagagcaaagcagagagcacctagatcaaactgtccccattgcttctagcccgtatacgcgaaccgagccagctgtatatgagcctcaaaacaccgaatttgcacataacgccacaaagcctctacccatatgcatttcaaatcgaatagagagagcagcatggactccactttgtgagtttccctgcaaagtgcgagccttttatactgtcttcttacatttcaatttccagcaaaccgaccccgagccatctccatgaaacctgatgacaacacagatggtgaaattattaagcttcctgacgttgtatttgtcaaaggcaatgtttatttacgcgaaataggaacactattccaagatggagaagggagtaacaggtgcccaatgacataatgaggacccagcgtagaaagtaatgaatagcaaaatacgtctgctttgatacacctatataacctttatgattccctctcgttactagtagcatgacgacagcatcaagctttttacaccttggcctcatctttcagaaagcatttggaatcatggcaaggtcgacgccacatataatcaaagccatgttccgtttcatgctccttgcacaattccgttcttcacaattctggtcttcggctctcaaagctatactccgtttcatgctcctcgcgcaatttcaatcttcagctgtcatatcctttgccaaactcctacactattttcaggataaatgggggaatcttacaatttggattctgtatctgttcacgtactcgatttcaataagttcatttgacgagttgcatccgtccttgatgagattgatttcgcgccaccatatgttggcaaacgcacaacattccattgcaagaacaaagtcgaaatggtcaatatgggtagaggatgatgccgactcagaggatgacgctgaaactcttgattctcagttcaagagaaacgaaaacctctactggaagagacagaagcgaaaaggcctgcgaaaaattaaattcgagccaacccgaggaaatgtcgtcaccttctattacaaagggtacctaataggtcttcgtcgtgaggcaaagcctgggaccaccattattacagaagagtccgaggtcatctggctatactcgacagaccggagcattcttcaaagcctgcttagtgatgttcgtgacttacaaacattgaaagaccactgggtacaatattttcgtggcgaaacagcgaaagacgtttcctgctggtatcctatcgccaaagaacctcctcgatctccctccactctgatactggaaggagaagttctggcacatattgtgtccgatattaaaaactacctcgatccatcaaccgaaagattttataaaagaatcggcaaacctcaccgccgtggtttccttttatatggtcctcccggaacaggcaaatcaagtctatgtgcagttttggccggaaggttctatatgaacatttacacattgagtctgaacagttccaatctcacggaaagtggtctagtgaagctctttagggatctccctgatcacgcgatgatcgttctcgaggatatcgaccgggcctggggttctgtagagcaattcaaaacagacattccatcagggacggagtcacatgcacgtaccggtatctctctctctgccctcttgaacgtgatcgacgggaacggtgcaaaggaaaagcgtgttctctttatgactaccaaccatctggaaaatttggattctgctctgatacgacccggtcgaattgaccgtaccttttaccttggttacgcaacagcaatgatgatcaaaaaattattcatattattctatgagccattcggggttgacaaggatgaactttcagaattggcaagcaggttcgccagtgaggtcccaagcgagatcttcacggcagctgcaatccaaaactttttactgaatcataaagatgccccggagagggctgtttctagtgcagccgattgggtgaattctcgctcaaaggaatcttaggttcactaacgagccgtttcagagcgtctgtcgcactgtacggcgtttgcgggttggaatatcgctttccccatgctaagagagctgaaaaggggtgggggagagagatggaagaggggtggtggaaaatcactgcggctacagcgcatccgactgccatgtcaaggatcactagtcacatgagcagcttctacaggcaattttatgtgaaagatgtattttccgggttttcagcctacatgaaaagattacgaacctaggaaaagatctatactcgcacaacgactttagatctttacagacaagttactcatttccccaccatgaagcaagcaagtctcggtgaggctcatataaattccagggcaatatccattcatcctagcgctctttcccaaaaatcttcttaaaagtttccgtgtccaaatcgccattgaacagggtgctgttattcttcacagacccaccattgatcatgtggagctgggttttatcgggatgcttgtctctagcgttgccgttgaatacaactgatcctttatctatttccatcccaaataagacatgtgcggaccgccttgaagaagcatctatggggagggggaatttatattagatttttctcaagtgagggcagcaaggagtgagacaacatcgcaatacctcgacttttttcctcctcgcctagaggaacgagatctgaggattgtttctatgatcagacaagtggttagctagaacatggtattttcttggtcacaactcaccttgttttccgaagacagggccatatcctccttacggtgctgagaagtgactggagggccacttctagaattttcttcattcttgtttggatccatatcaacaatgagaatgaaacggccgaagaggatgaaagtacttgttgagtgaatgtattgtagagtggactgtcatatttatatcctagggtctcgctatgagatcaatcgaactagtctcaaaatgaatgagactgaaaggactagccagtctttctgccaggcgttacaaaaacaagcctagtcaatcaaaaatggtatttaataaaatcttctgcccttaagattcctgcggtcacggaaagggttcttgtttacgactcatcccctcaccctgcgatttgaaaaaggtaaagacatgctaataggctcttgagtctcgtaatagaacgattccggtcaccgaaatcgtagtatgcgtattctcgttggtggctggctaagatggacatggttttacttgccattacgttgttcggataatgccaaggccggcatgtgccaccttcaattgatacttcggtcttttggtagaaccaccgagtctgacgatactgcaagatgggtgccactctttcacggctcaccctctgctcacctcctctgatcgtgggattcattgtgtttgtaaagtcgaaatagatgggatagaaggatttacacaacattttgcaagtgacaagaagaaccacacagacatagcatgagctggagaactggggatatcaaattgtggttagcgtatctcttactctcgctgagagtgccactagaccaaaataggcagcacagtgtctgttgcttatggcggattttgtttaatcctttttccttttctcatgcttttgctttttttttgcctggagatagaatcttctgttctgctttattgctacaatatgtacctgacagcggctcgtctcttgtcttgactccgaaatcttcttatttaaggcggtcgccagcagatgccactatcagacctagagatcgtactataagaccggatagtaggggaaagtaccccgaagtggagaataaaaatagtgtgtccacagtaattattatagtactcactcagatggtctctagggagccaacaccaacaggctttccgaggcctaagagctcagactagtacagaataggtagaggctgatcggggtttccctgtcaatgcatatactagcgctgatcattgtatggaggtgggaggtggcttgctacaatttcggtatcctgggatattgtgaaatgaggtggctgttgattgatagaccacatgcctcccttgtcaccctttccagatgcaagtttgggcatgcaagcccagactagacactcccattctgctagggatcagactgtatgtgagatttttcagctccacatgaaagtgaattaggattatttctgttagaaaataaagcgcgtcagacgaacgagtcaaggtctagggtttatgtacctatgtcaatcaaatcacaggctagaagcgacacgcgtggcaatatataagtgtcataacctcttcagatccaggtttttttaccatactcagctatgtcggctgcaataatcaacgccggtaccccttttagagtaccactctagtcccgagccgatcaatgcagccagtgttgatattcctctctatcgtctgaaagaactgtttcccgacattcaacgcttcacagctatggctgtcgtgttttcctaccaccctgataacccattggcaccaagagttttattaatcaaacgaaacggcaaggaaagctcatggggtaatacctggcagccagggggaggaactccagacgagaaggacccgactatcatccattccgctgcccgagaaagcggggaggagacgcagatttggccttcgagaattgctggcaatgcttttacgtgttctttctatcacagagatagaaagaccagcgacatagtcatcatgcgcacgctcggattcatcatcgtcggcaacgaagagacgatggcgcaacgagtctggtccagcgagatgcaagagccggtcggccaaagttccgtcgagattagcgacgagcatctcgatcattgctggttcaccgaggaagaagttcgcagcgctgctctatatgagcaagccactccacagggtccattcgctatgctcctggccaaaatggacatggttttacttgcctttgagttgttcagacgcgagaattgcccgccttcaatagatatagcgccctatggcgtaaggggaacttggaaaatgattgagctccttaggagccctcaaatgatggccacacgaaaatccagcgggttaattggagcggtcacttaccactagcaactttcccatgcgccattttgggctatttgagaatctagtgttgttactaccgattctgcatatacaaacatatttcattaccattgacaattattctatttaatgcacagatagaaaaaaataagaaaaggatcagaaacttcgatactttgtatatcctcgctttgcgcaagctggcgactggtgcaagagatattgttctttttgaggagcagcgcgagcaatgtcctcgaatgattttattgcccgaaaagcaacaaccgcgactctccacatgagatgcgcttttccttcaccccgtccatcaatgagctcccactgaagacgaacattagagtcacccccaggagatgataccttcatgaaatttaataccccggtcatcgtggagtaatcaccaagtgctttccaggaaatggtggctcaagcttccctgccctttttgtccaaacgacaggatagtaatccaccacggcacgccaagggtcttcgggaaaggtgatgctggttttgctagaaattgactgcaattttgctttatccttcaagatgacttagtagtactcacattctcatccggggcactaaggcatacttcgagtaagcattccacgacaggtcgcacgtcctctttgcttcttggtgagacgaagagccaggggtatcgatcatgagatgtccgcgttatctgtgatctgactttagcagctgcaacagcagctgcgttctctaatagcgatttatacggcataagagaaaatccgaaggtgatggttggcgtaatttaagattcttctaaaaactgcacagtccgtctgaaaattggttgtagaatattcaggttgaaagcacgatttgaacagaaagtgggcgaatggctgaggggcggaggggcgatggcggggattgaaggtcggacagtcatacggtagtgcagtcacgcggttgtggtcccgagaggtttgcatggtttgcatactcttagtgcctaaggcaacaaggacttcgctttagcatatgcgcgatatgcacctgggcatgcaagctagtcttggcaagacacacccggggaattaatttcagtaagtcttcttttcctggtctctataaatagttaaaccgcgcaggggacaatatggacaatgtggctgtcaaattaccagagatagtgacggctatgcatttgaaccatataggatgcgtccatacacgagtagtccagatcggcgtcctagtagggcatcatattgaaatatatactttagcaagtactaacctattattaaccaacaaagtaccaggacccttaagcattcacgtaggtaacgccacgccaaaatgacttagcagaagagggaacttagggttcgcgaatgggttagaaagttagtatgcaatttgcagggttggccttccattcatttaggttcgcgagagcctcctcagtgaccgctttagtactaaaaggtcgccacgccttaagtataatagattctgtggcgggggattccccccacttttggacgtcttatagtaagaacttctcggaaaacttgcctatgattagcaaatagaccacggccttattaagggcaggataagattttgcggtaggagggttcctatatagggcgtatacaatcatagtatctagtgggaagcgggaattgtttctatatacctgtcagttaaggggggataatactatactaaaagaattcttacatttttttgcctacttctttactataccgaataagaaagctggggccgaagtagtatatacactactactaatacttaccgattttctttttattatagaaagatttataaagttttcttttctcaactggtatcaggcctctcgagttacaaagtgtactgataacatttctttttagagcagtctctactataccccattgacgtttatactcaatttctctaataaaaaacagaaatagagaatatcgagtaatacgtagctttatatcatatatattattcttattatataggcgtattaaataggttataagactggtacaattaggcttttaagcggtattcgaggagcttaagttattctaggaagggccgctctagaaactagagaccttctaggtataggagtattattctaaaaaggcagtaaggttatatgaataaaggtgtttaccggtacactagacttccgttagctattataaagtcagttaggaatataccgattctagaatattaggttcattcggttcacaatcttcaactactatacttggttactccggctcctctggttactccggctcctctagttgctccggctcctccggttacttaggctcctccggttgcttaggctcctctaattacttaagggtaaggtagggcctaaggttcctagaggattggtctgattgagatttaatagtaagggaaagcttccgcttagagcttgcctaaaaacccctaattgataagggtaagtgagatatatctaaaagcttcttaggccatgcagacaggctattattattaagcggagagatagatctagaaatgcgaccttagggatttgaggttaagtcgaccgaattcttatctttacttaaaaaccttatagaatcactaataaccaagttaatatctaattccctaaagctttcacttaaaattgaataattattagggttactaccccttatattactaggagtatagtcggctcgttactatagttctaataagtatcgtttaaataagtattatttacttgaggtaatatcattagagctaattaaattaatagtagcaatttcgtctttatcaggagtatctttaactatcggctagggtctcgataaggattatcggaagcgtttaggtattatacctctcgatttaatttcctctagtattacttttattaacctctctaatcgcccaatcgttagactcgttaggctaaccgaacgaatatatatctcgttctttgtatattaggtacctaaggtttttaaagatctaggctaagtcgatatatattagtggttattatctaaatcgatagtagaattgtaagaagttatatctaagttgtttagtaagtttatatttaggctatctaggagatacttatcgaaattattaggaaaagattaattataggtattaatagatatatctagaaaataaaggtaaattaagtcaaatcctcgagaagttgtgtttctaggcttctttactagataagttttagttattcggtaggactaccctatctaataatactataagatagccttaatttaggctactatctatagctgataaagaaaattgtctagagctattatactttaccttataatcgaataaacagtctgtattagcttaaatttacttataaaggctaataaccgttttaataggtaatatcgactaaagtttataaaagatatagactatatttagaatctataatagggttaataagcgttaggtcctaagtagagttaggcctacctctttctctaaattttctctaggtaagaagttaaagctcccttattctctatagtgattagcctaaaggaagagtcagatagtataagttctgattaggtagctagcttatattaagagaaaacttgatctaaagtattttaagggtaaaagcttctaaagaggactaaggaattcgatagtaaataataaatagatttcgagagtacttagagatcgctaatatactttaggggaagaggggagcaatactaactataaggataatgtaggtactactctttcttagcttaccttcggcttactctctacttactctctgcttaccctctacttacctcctctaatcgcgggatttattatatttataaagtcgaatcatatgggatagaagggtttgcgtaacattttataagtagctgagggtataaaaggaactttataataatctaacgaattcaacctctatagttaaagtgaatgactatattctttagtcttattgtaagttattaaagaaaggaaaaacgatctttataaagtaattatataggattagttaaagctgttattatataactagtattatagactaataataaacgttaatttatagtataattatagggcgattagagcacttagtaagcgcttagtaagtacttaggaagtaaggcagaaattattcctcccagcagaaaatgtaaatataccctaggacctagttattagacctagtataagttatatagtgctatttagtaggcttagcgggtcttatcacattatttcctaaaatggttacgtatatttaacaaatgtacaattaaggcttacttaatacattatgatttaggatcgcttaataagcgacctttaactgctatcacaaccaggaaccactaggtttctactccctactcgttatatataggcaactgtcgagtgagataagagcttttgcttgctttccctgcgccacctcttgttatattaaagtaaggaaatggataccctttaagaaatattattataaaaattggatggattagttgatcctagacgtgtgttaaccattacatacaatcaactcgataagcgttaagtaactaggaagtcaatagttcttaagggcagtgttagttcttacggtcctttccctttatacgtatgtcgaacgtgaagggagttactagctaagtgttttacttattcgaggaaatcatattgcttaattaatcaattaaattgattaccggcgcatagaatggctaaaatgattgattcgtttatatatatttaaagcaaacttagccgatgatgaattcttttgcccggctgcttaagatcacgtatatgcacaatatgaaggtttgctggtgctcaaggtatgctgtagtgacgttacagtcacgtaaaaggtatggcgggcaatatgtcaataacgttgaaagtacggttgctttcacgttgccgtacctatttgatgaccgcaaataccaccggtcattgcccttctagtcttgcggggcccgcattgtgagtttaatacataaaggaccaattttcgtggtcttttcgtgttctatgattggttactccccttcgtgcaataacattcatatttattgagccctttcctattagcagacctaagttttgtaagagtccctgctatctattttttctatatagatttctcttctcccaactacccccagatatcaaggcaatccgctcaatggccgctattaaggccaccaggtccaagcatgtcacttcgaaaataaaattgatacggcaaaaacaatgccgtcgcaaaacaagtctgatgaaaaaggcatgcgaatatagtaggatgtgcagcgcagatgtgtgcgtaggtattcgcatgcgggagaccggtcaggtgcatatcttgtcggcggatgcttcgggcttttgggcttttcttacttcgcaattggtatgtaaactacatggcatcatctaccaggcggagcgctgacttaacagagctctcattacccaactccgactgtgatgacagatcgtgatttggagaaaaccagggaggagacagtttttagggagcaacgataggaaaaaaaaaacgcaactgctgtacactagagtatgcaagttatttctatccttattgcagtatgtttttgcccataaacatttttgtgaaaaacagtttttgcttttcctttcactctcttacttgctatgtcaagaagtatatcagaggctgtgctaagccaaatatcacagtagtctacaatatcattgtgagtttcatgaataaagcaggaagaggctcgaagcttgaccgggaagagccgccaaattgggggagggaaaggaagatgagccgccctgcaatagaccatatcatgagagatatacacattagagtaacaacggtcccaagcagcgatatgggtgcctgagaaataaacgtggtaacgctgagcgagttgttgcttccggcataaatattagtcatcctgctggtgaggattactatccctgggagtataaagcaccgtggtttccttgcaatagttgaaaaatatgtgatacccaagtcctgactgacaatggaaatcacgatcttttacgccattgcagtggggtgcttactgacaacgctctttctcattcgcatagccccctcctttctgaatctactcggaattttgtcgttcctcattacgaaacacttaacatatccatacttgtggggtcgctataggctgattgctccttgcactcgagcagatgccttattatatctcgcgtacgctgtaacaaatgtttttcttgttgccttcaagactccgtcaacaacaatggcaagagaccgagccggaaccctttcagtgatcaacatgagtttcctgttcttggcacatcatctaggattccttgcaaacgccatgggtgtttctttgatggcgtgcaagcgcatccatcgggctgtgggttggatgactggcattcttcttggtttacatatcatcatggcaatgataactgatcggaagagctggatacttcgcgagaagcctaacctctttgtattaattgtttgtcatcgctctcgcttaacctaccctgttagattagtagcgctaattcttcttagggctctgtgattatggctgcaattctattgttatccttccctttcgttcgccgtttcctttatgagccattccttcgactgcactaagccctggctatagcttgcatatattctgtatggcggtatctgccatccggtactctgctgccccggctgtatgtttacattccgcttggcataatgctacttgtattgctggtcgaacttttccttttcattattaggaacggtgtcttccccctatgtccctattcttgtgcctctattagatgtgatcgggtgtaacaaatactaatacagagcaaagaggtaataccactgaaagtaaggagcccaacctcttcgcattaattgtttgtcatcgctctcactcaacctaccctgtcagatttagtagcgctaatccttttcagggctctgtgattatagccgcgattttattgtcatccttccctttcattcgccgtttcctttacgagccattccttcgactgcaccaagccctggccacagcttgcatatattctatatggcggcatctaccatccggtgctctgctgccccggctgtatgtttacattccgcttggcataatgctacttgcgttgctggtcgaacttttccttttcatcgttaggaacggtgtcttccccccacgtccctattctcgtgcctctatcagatgtgaccgggtgcaacaaacaccgatacagagcaaagaggcaacaccgctgaaagtaaggattgcactcacaaggcccctacatatccaggcaggccaatacataagtctctggatacccgcggcaagcctattctcctgggcccagacacacccgttcatggtgacatcttggtcgccagaaaagcaggatgtcctggagctttttgttcaacctcgaagagggctcactgagactattcaccatcgtacagcactggatggctatacttccttaacagcatttgttggcgggccgtatggagtcagcaaatccgtagaccattacgaatgcgtcttggcaattgcgaccgatttcggtatagcaggtgtcatatcttaccttaaaaagctcctatacgggtacaacacttgcacgtcacatgtgcgccgggtacatttcgtgtgggagatccaaacattgggtaagttcggcccccgcgttcaaagagcaaaccaacgatgctgaatttctcagatattgctgttgcagcccaaccacttctaaacagcttgttaagcgatgatatcttggatgatggctatgtgggttggctgttcatgtttaaccatactcgcgctaataacgtgatacagatactcgaaatgtctttttttgtggcatcaaaccagatgatagaacatggcaagccgtttggccagcatcgccgcgcgacagttttcaatggaaagcctcggtatgatgaaattatatcagaagaggcttccgggcgaaacataaaacggctgccaaacactcatgaagaccgcggtgaggttctggttatgggtaagtccatcaccttgaataacaaaccagacgctaacttcctagtatccgcatcgcatgaagtacgagatcgtttgagagaattagttcgtaaacacctcgaacagagagtaaggttacatgagacggagtttcaaccttcataacgagaagggactaatctgtcaagtggggggagatggggcgggtggggccagcgaatgaccaattggccacagattaaatagaattcaccgccctccagaaacaagtttaaccattgcacccgatctgttcttcaccgtcaccgtaaaccgattcatcagtgtattcccccagtccaaggaacagcgtatgctctatgattctgtgatcagttcttgtttattccaatcacggcataatttaggatttgtaaacagggtgtactccattccctgatcggcttctgtttcaattctcacagtttcttagaaagcgattccgttctgactatgaccttgctgttgcgttgacgaggattttcataagggcatggcgaccggcaaaatctacttcaacgatcccatttttttttttggcgggttgggaaaactgtggccatgagagaaaaatcgtggtcaaataattcgatttattgccgtttaggttgcgacacctttttagggtcgcaaccaaaacggctcccagttgtcacctttcaggatgcgcctttgggagacgcttgaaacccctgtgtgccattgtttattttattttctaaccattcgctttcttcctccaaattcagtgtctgttcctctttacactttgcttgacagaacacgaggcaattcttctactatccagacgttcccccttgaagcccaccgttacgagaagttgaccatcaatttcttagtgtcgctgaccagcacacgaataatggtatcatttgacccagacactttagtctctcatggtgcccctggacccgatatttctgatgatgaccttgttgattgggatacctggctcacaccagaggcactccacaatgaaaaatatctggctacctcacaatgcagctttatcaacatgggaagctgtactgagcgtcagcatttactgaaacatgctcctcagcttcattcaaaccagccagaagtccctctgccatcagatgggagtttacagttgacgcagtccacagacggcaacaaagagacaatgacaataggtctccaaacgtcgagtgcaggcgtatatgcctttgcgaaatgtggaaacacagaaatccaacccatcgtgatcaacgaaaaagaacaactcaagtattcaaagcccagtgaagacaattacagtctgttcggccttgggaatcaccaccagagaagagccctcatttcaccagatctcaagcttctgaaagtacaagagatcgaaagggaaacctttcacaaatacaagccagtcgataaccggacccaggcagctgagtacgttgactgcattcaaagaatatgtcagattgcaactggcgagactatgagcgtaaaacaagcccgagacgtcgaagactgcggtgatagcttgatcacaattatacgatccgacggcccgattgcctcgtttaagtctcttttacttaactgtcacttgtataccttacctcgtgttgacttgaattcgtccctagcggcatgcgtgtcatatctgaggtacttgaactcgctcacttcttcaatttcgaagtcagacgatatgaatcgccgtcttgcccagatttggatccatattcatttcgaaaatcatgtcaatgatttaaaggaaagtgagaaaaacggtcttccgcttaaccgacaacgtcgggcaatccctacgatcgctagagattctatcttacaggcttttcatgggaaccaattcgtgccccaaaaaacagatcgcgactatttgagtgatcaatgccgctggggcgagcgttggtggaaagctgctacttgcatgggacttggtgtgatcttactagccagtgaagacttggcaaatcaaatgtatgctcatttatgccctatggaatggttttattgctgactttgaatagaggtagaagaacagcttttcagaacaaaatggtagacacgttggccatttatgttctcaatcgctacccagctctaaccagtctttatcgatcgtttgagtctatggcagtagacctcatgcttggaggtgatatcgtctcttcccaggaccagctaaacctcatccaagaggcgcccgtggagaatgaagcaaattcatgcaagctagaaagatgggtggttcccaacctcaactctctgtctagaattgcttcttcccacctgatctttctccagggattctaaggccatagttatttctagcaggtgttgagtcaaacatattatctcataatgccatcgtctctcttgctcttagaccgtagggaaccgtgtcccagagggaggggccttttccaagtcgcaattgctgactcagatttagctccaaatgaccccctaagctgaggttattggatcatatcctacaaccaatccttgtcttctcgatacgcgcgctggctggtggttgcggatggcaccaccttctcggtccctgtcctttaaattcttcaataaattcgtgataaagatcgtggtctattagaggatttcggccacaatgagtcaatcacgcagcatgtatgaagtctcttatgcggcagccacgtctcattttaggaatggcgcctcatacccatctcaatttctcagacgacattccgagcccacgatctccttcactcgtaactggtaattattggttttgtaccgtgattttctgaatagttaggacctagccgccatttaaggacctactagggaaaaatagcatttctaggttcttagtttcttcagtactcaaaattagagctctttgctgaagtacacgagctaatagattacattgtctggatgcacgcttgatgcatttactgacaacctttccgacatgattgaaagttacgggtatatgatggaacctttgaaaaccatgagcaagccaatactcacaattccttgaaagatatcgtttcctactatctctcgtaggaatagaacatccttgcagagactaaaacagaccgagcaagaagcatcaactctcctaccaatcggctttctttgcggacaagcggttgctgataaatgttagttttatattcgtctactcatgacatgttggcttgggtacctctttcaaagattcaatagactttgctgtcgagagggcggaaaggaacccaaaggcatctgagtcgacaggccaacgatccacgtcatctactcccaccattccatcatctttcacatacttctgcatgatttccatggtaatgcaagcgagagttttgatgtatacattctgtgcctgacccgggggacgttctacgcacatctccaagctggctataggggattagaataatcattatgaaggacgcaattgccacttaccgatcttgataacgccatctaggccgagaaggatattccggcatatcagagactggtgttctaatccagtttcattgaggtaacataaaccattcaaaatctgcactgtcgtgagcttaaaatacttgaagtgtcaagagccacatacctgccaagtcatagaagctaattccgcctccgtaggatagagagaccgacaccccacaagctgctccaaagtgagctggaggtcgttgacgagagcgtacatgcatccttcattaacgaagcactctcgggccgtcaatacattatcgtggtcaaggatatcatacagtcgtcgcattttagccacgtcccctttggtgtactcccgaatggctactacctgggacggatgggaacggcgagctgcaatgaacacctcacctgccagattacacctgagggtccgacgataggtgtcccagggtgattcctccctcacgattaacccgagatatgtaccttcctcgcacacctgaggtaagccaaagcattttgggcctccactcacaacctttcgtgtatgttcgctccggggagacatttttctcttttttgagttggaactactgtccaattgggtgggtgcatcaagctggtgtggctgtttgctcaagggtgcctctcgtggtgggttattcgcaagtcgttcttggtagctcttgaagtcaatcgccgtgcagtgcttgtcttgtttcgacatatttggaccagatcaagaggtgcggaaaggaaatgaggtggaaacgtatagtgcttgaaggcgaaggcctatttataatgcaattgtattaatggaactaaatctgttttgggggccacccccagcttttgcagtcacattggtcaccaggacgctgaatcagctaggtggaccctttcttctgtgaggccaagaccagtcaaatataaacaaccgatactctactgctacgtagattctgcctcaccagcacaatggacgagtctatatacacagatcctgagctgcagatcctgacagaaaggtgtcggacttaccaaggaacagccaaggttaacatcagccagattaccccccacccatccatctcgcaacatatgaacacaaaaaatgtggaaagactctgtgagatatttgacaaagaaggttgtcgaagactcgatatatacaaccacgtgagcgctgttgtgtcaagagagcatctccatgaggctcttcaagcagggcgagtaaacgccgctgacatgatgactgatcaaccgagccgctacccacacctccatttctccactggttccatacagtgccttcatggtcaacatcgattaaaggccggagaacactatttaccatcgatcgaccaatggtggactgttgacttgtatttggatggtaagccagaaatccaccacatgctttcccgcagttttgacaaccccaagacattagtcccgatcttcaaacaagccttgtcgatgaatattccaacgagagagttccaagcgatggtgagatttacctgaaagttcggcaatatcgatatgaagcaaattcacacttcgaaaatcgatggttggcgcggctgtcagacaacaaagccaggcggcttcgcggacttgagtctcatccgagcgtccgagctgcttttgactcgttactcggcttgccctccttgatgatacatggaatgcaaatcggatctcttccgcaggctctggctatttgctgcgacgaggtaaggtcgtctgactcttaaaaaaacatagatgctgattacgttcgtaggagatagttcacgcgctgactaggctacggcaatactggtcttcactcgtgggacacgatcgtgctaagatgctcaaagttgaccctcatacggtggaaacattgcaactcctggcacctggagtctcctcgaaggatagaaccaccgtgaaaggtcttgtacacagtggcgaagtcttttcaaatttcacagcatccgagcggacctcaatttggaagcgattaaagaggacagagggcataattccatctctgtatacgtttttcaaggatctctggtacctagaatcatgcgcgaactgcatcaaacggcttatcataccttccagatcattccccacgattagaggcgccacgcgtgcggccttcttgtcttttgattccacccatacgcagttcttgatacaaacatccgaagctgggtttcgatcttactcgcactcccagggggacccagcggaacttggatatcgacaactatggctctatgctatgcgtcactacccgaagttatccaaaaagcctcagaagaaaaatcctacggcgaagcctaattgtgaggtggtggagcctatgatactgtatgagatggctgtactcgcaaagagacttgggtttcagtcgccacaaattgagcagctcatccagcagtcgcccgatcggcaaattgcgcaagatgctcttttgagagcccgtcgaccagatcgttatcggtacaatagggaagaaattgaatctctgatcaacaaagtcaccgagtgcttcttgagggccgtccttcttgaccataagcttccagtacaattcgttggtggaagggaatccaagaaggaatctcgatgtggacatccgcaaaccgaagcccaactgcaagattgtcaattccttttcatcgaccaactccatggtgattccctccaaagggaacgaaaagctacttccactttggtgaggagcagtgtctactttaccttcttcagcaagctgtcaatgccctgtgaaaataacgacacagcgggtatatctccaactccagacttgccaatgtccccgctttttattccgagcaatagttcgccgcaagatgaaggagaacgggttgggtctgcgggtacaggagccgggcaggatagcaacttagagcggcaacgtttgaaagatgcacgccgagggagacgtcagcagaagcaagcgaagaagctacagaggcaacagcaacgacagcagcgaagacaccgatcctcacgtgcgggccgtcattatggcaaggaaatcgcgcgcattgattcggaaggcagccggataggagaggtagtggagccagcatccgagacaggatttggattcgttggaagtaggggtataataagtcaaaatgagcagggtcttcttcatatggaaccagccgaagccgatgaactggagcatggcgagattattgagggggatcatggtttcagcgacgaagaagaatcagaagatagtcacgctggatttgggtttgttccctcgagacctccctcgctttctgttgcgtcaaggtatacctccacggaactacaagtatcaacggtctcgcacgaccaactgtccttgatgcaacccccacagtcaccaggagagtttcgtttgacatctatggcctctttaccaccacacccagatatgaattcgcatgagaggcaacaacacctcctcgccgccggatttgaagatcacgactctatggcaccaacgggcaaggaaaacaaaatcctccgtcttgctgatgccgaggacgagcagccgcggggagggggcgaggaaaacatagccgggggagaatcttcgatagatgtcaatatggaagagcacgcaggcgaacaagagaatgaagcggcagaaacagcagcgcagctttcttcatccgaagaagttgaaaaagcactggcaattttagaaggacgtggggcatcggagataacatcgggcccctctaggactgtgggcaccaaaagtgcggcgctgcgagagagcgctaaattcaaaccatacgaccgcacgcaacagcgcgaacaaacccgcaagctatccattccgccacaggaaactctggagcaggatataaacgcactgttacgaacggctgatcaggaacagacagcaagacctggtactcaaattgatttcctcgaagcacagcatcatcctttgttggagatgaatgaagagcagagttcatggcccgtggctagtcaagttggcctgactcaggaccagcaacaggcaccggaagaaagatcaggctcggtcgagttagaaccgcagccagaaatttcgagctcgatcgatcaaaactcagaccaccatggaataaggaatgtccgatcggaacaggaagaacggtcgtctgagtctgtaccgctggacgcttcgccgcaggttcatgttatcgccgatgctacgcagaaggacactctggtagagcgcccctcgtcgtcactacaacgagagtctcccgcgcagaccgatacgcgcacacggatagaaataactgggtcagacaagttgcccgaggaacaagacaagtctcgtgagcgaggagaaggagcgagcgatgcagccaagcatcctgcagtgacaatcatgttccgtgcacgtgatgaacacggcgactggaatcgcttggtccaccaaatggtggtcgatccatctgacccctctcctgttgggcgaatggcgtccaaaaacgcgcgagaacgtcaggcaacgttttatgaccagaatctacggcaggtcccaccggggcagtgctttgatgcggcaattgaggatggcacgaacacgatattcatgacattcggcgacgatctggttgtgagtgaagaggcggtgaattcgatcgcacgagtaattgaacccggtagcgatgatgatcggccgacaaaacgccggcagtaggcgataataatgcacttgagatctagatcaaaatacttgtatcccatatagaccgtagtcagaagaccgaggacccttatggtcactgagccagggtagccgccagttgacagctataaagcccacctagactaggagccgtggacgtacgtccaaagtgggtccacgtccactgtcttccatcggtggcctcgaatcaactgtgctaggtcacagtgcctaaagccaaagccttcccaccacagcttcccaaccacggacccacatctccagactcaaagcccgcttggacgcagatccacagatccattacatgactggccttaaggcactggatttgtgtctttgtcggcctggggacaacataggccagaaaacactcttcctccatctatggaagcgccatgtccagctttttagttgaatccgtcgtaaagctcatctagcctcgatttcttggtaaacgtccctaaaggggctcttgaaccctccagtttgatactgaaggtaggactggatacgggcgagcctctcacaccaagatcaatctcaacctctacccaagataccccttttccagctagcaaatgacgcaggtagcggggctgggcgttccagtggggtcaaggagaccatgaaagaaagatgatcaaattcgtgggccttgctccaggacgctgagtcagcgtcctggagcaatcacattgaggtagcatgtagacgacacatttcttgttagccactgatcaattatttaaactcatgctgctcacttcttctgatgctcctgtatatagtgctgcctcgagtttaattgataacaccgacgaaatatctcgttatgattcaagtacggccagagtaagtacgctttcctttcctctggaggcgttatctaaaaacacccagtcaatttatctcccccctcgcatacctggaggttggccccaacgggaagaaattcgctgcgcccagcgggataatccaaagcctccggtgtcgttacaaaagttcgcccgaaataatatatgtggttgacgacgatgttgaggatatctttggccatattcttcagtaccttcacagtggggactactctgtccttattccagcagccgataaatcgagtcatgcttcatgcgaagatgaaatcgatattgcaacgcaggatctgcttcccttgaaagaaaattattttgcgagtcatgaagatatccaggtgaagaccgacaattcgatatctttgccacattgtggggatggaaaccacctgtgcaaacatcccaagacactgctggtgcatgctcgtttgtatgacttcgctactagacatggattggaccaacttggaaatgtgagtttcaacaagctttactggactctctcggaatatccgttagattcagaacaagcggacgcaatcgtcgagcttttacgggttgccaatggaataggcaccatctatgcgctaatgattcactatgtatcgttccacctaaagactttcatacgttgttccagttttctctcgttcttggaagaaaaccatcatatcagcttccacttgttcaatctcttatgtgattccctgtgagcctttattcttcatagaagggcctagagcgctgaaagtatcctgggatattgagatgagatcacgtgcccctgggtacgcaagccagtcttagcaagacacacccggggaattaatttcagttatagtatttaagctagaagatctgcctcgcttggtttccttataataccttcttcagccttccccaggtcttgatccatgattaaaaatggggtcggataataggaggcctagaaaagttagccttggtcatgtgactcgtttctgcctgcatactagttgcgacccaagaaatccccaaaatcccgaggcatccgccgataggataaacacttggcccgtttctcgaaggcgaatcccgacgcagacgtctgcttcacacaacctactatattcgcgtgccttttttattaaattggatttgcgacgaccttgtttttgacgcattgattttcttttcgaagaagagccatttgaacgagggcctgtagtcgccatctgctagtttgtagcctgaaatatgcctcgggactctagaaatagacttgctggaatgtagaattaagaaataaggaagtgagtgctcttatagttatagacttgttggctagggagtagcttttaaagaacgtctaacgagggcctgtagtcgccatctgctagtctgtagcctaaaatatgcctcgggactctagtattagacttgctggaaagtagagttaagaaatcaggaagtgggtgctcttatagtcgtatgcttgttggctagggagtggcttttaaagaacgtcaaacgttatgaaagcacgaaaagcgcaaaagcgcaaaagtgcaatggcggtttttgaacatataaccgtgccaagcccaccaacacactacctgatattggtgggcttggcacggttagtaggacttcaatctagcaaacaaatcaaaccaccaattcaagcaccaacaacagcactgacgatagcccaatcgactgcaagtagggcacaggatcttcattgccaatagagtaagactattctgaacagtttcgtgctacgtggccaggctgcccacaactgaaacactgaccattctgccttcgctcctcagtaagttgacgttcaacagcgatcgctttctctgccatcttttcccacgtgtcaggaagctcccctaattgacgaagaccaatttgcaattcttttttaaggctaatgaagaaaatggatgcaataaatgtctcccgtgtgattttgcttcggagcttcaggaattcggaaacgtagtcagctgcgctcccagtctgtaccagacattgaagccgaactactgcttcgattctagtaaggggctcattcgatgccgacatgtctattgtcatgctaagagatatttcttaggaaatcaagatcaaaatataggacttacacgtgatagtatttgttcgcaatgcccacttagctcatgaggtgccttaacagagtgcaaaaagagcgaaaattaccactatatatctctagagcaaaggcgaggggtaggtaggagccgcttatcgattggtaggtggaagagctttattggaagcgcttctaaagaaaggtcctggccaaagtaacactgcaatatagttttatataattctaaccgccgaccctatctataccgatagtattaagttaactaaggagaagggcttgagactaggtataaatcgacctttatctactattagtaataaactgatcgtttatataaggcggcgcgaggccactactcagccatccgcgatataaagaaatacaattattattacagatttgggactatatatattgtatctgtgcagcgataaagctaagatactgctaagcagaacgtttatactactagcggtttaattatatacgcgctatattgtgagctccgagtatcgatcctaactatcttaataaataaaggttattaggtattactagagacggaggatttatttttatgaatttagatagttcgcaatatatccaaatatccttagaatcaaaataatagcgagggggtcacaaggttatagattaactaaagttatcctatagactgtagaagttagctaggatcgttaatcaatcgcagagtcctaaaattaaaattcgataaaccataggaaaggtcgctcggtaagagaatacggttattattaataatccttaaggaaagcttatctataagcctctactccacttacttttaggttacttacaattaagctctatagctctaaagagatctagggcagaatcaccaacttctcagtcggatcatatatataatattgtaagatacaatactttatcaggaagatcttctacattcagcgttataatcaagatacgtaaggtgattgaaataaagttaagggctgtaggagtaccggcctacaatgccgacccttatttaggagccaatcgatgtctctgttctagtctaaaaaccggagatatttttttaccttatatagcttgtctgtagttagtatattttctataagctatctactagagatattaaattagcaatcggatttagcagatagagaggatgggttaggcttaaagagagtatagtttgtacgaggaaggtttatataagacaaaagatatagcttctagaaccttctatagactagataaagatagcagcagcttctgtatgaaggaccagtctctcttgcgagggtaactaaaccgtagattggacctcgttgagaaaagtttacgatattctaaataccttatctgtcccaaccgactgcccaagtaataaagacctgtcctatctgtactctgacggcccgtcaagactaggttttagatcgtgtctggacccttgcagatccttccgatttcttctgcgggccacaaatggaacctctgtgatctactatcctatgggtcgtccctgggatctgtatcgctgaactgtatctacgtctgtctaaagtcacgcgcggtgtttgattggtccgttgggtgctatttgtatctagggtatcattaatgtgacagtagcgttgcaatctttatgagggggtggcgatcatgagaacctaactcgtaggccatggtagctgaaataactcactatattgtccagtggactcaggtttactctagtttactctaggtttccaataagagctagactttttgatttctgttaaaaatagaaaactaataccttggatttgggggtattttcatagtgtctgtaccgataggtagtaaaagaattggtagagacaccatcagttggttacgaacgacatacaaaagtaccatttgagtagtataagggtagaattagacaaagaggactgtaattggataaatgggaggcacgtcctatagccaatatctggtacaatcgaatgtaactgtctgccacattgtccaacccattattgcggtacctatcgaagtacttcaacccttatgaaatagatagtaaccataactagtgactatggtcaaaataggcaaagtaatctaccactgcattgaggcatctaattgcaacttaagtgatatataggaattagatttttgcggcgttactttctgctcaataggtaataataatagtttaccacacttaacacaggttttaaatgtaatgaatccaggttgaaacttgagtctataggccacaaagtctcctaacgccatttcaatgttattcaaatgtctttaataccaataataagacggtgattctcgctactatctgcgcaactggttccttggtcgagacgtagccgaaaaaatataaaagggtctagattcctagcccaaaagaatcaggacttcggtcctcacactccgctgtgtcacaatgtccctctcttgcctgcgggcttgagcgtctccgtggctacggctatcgctgccacgagcccagcgatgtaagagggtgcttcgcaggataggtctgcgtcaacaacaatcctcgcaggagaccgctacgttaataagttctctgcaggagaccgctgcattaccaagctctccgcagcctaggtcctgcgtcaataacaatcctcgcaggataggctctgcgtcaacaacaatcctcgcaggatgggctctgcgtcatcaactgtgtctcgcaggataggctctgcgttatcaactgtgtctcgcaggataggcagggacatctgcgacaaaaagagtctccgcagggacatctgcgaaaccaagagtctccgcagggacatctgcgaaaccaagagtctccgcagggacatctgcgacaaaaagagtctccgcagggacatctgcgaaaccaagagtctccgcagggacatctgcgaaaccaagagtctccgcagggacatctgcgacaaaaagagtctccgcagggacatctgcgaaaccaagagtctccgcagggacatctgcgaaaccaagagtctccgcagggacatctgcgacaaaaagagtctccgcagggacatctgcgaaaccaagagtctccgcagggacatctgcgaaaccaagagtctccgcagggacatctgcgacaaaaagagtctccgcagggacatctgcgaaaccaagagtctccgcagggacatctgcgaaaccaagagtctccgcagggacatctgcgacaaaaagagtctccgcagggacatctgcgaaaccaagagtctccgcagggacatctgcgaaaccaagagtctccgcagggacatctgcgacaaaaagagtctccgcagggacatctgcgaaaccaagagtctccgcagggacatctgcgaaaccaagagtctccgcagggacatctgcgacaaaaagagtctccgcagggacatctgcgaaaccaagagtctccgcagggacatctgcgaaaccaagagtctccgcagggacatctgcgacaaaaagagtctccgcagggacatctgcgaaaccaagagtctccgcagggacatctgcgaaaccaagagtctccgcagggacatctgcgataccaagagtctccgtagggacatctgcgataccaagagtctccgcagggacatctgcgacaagaagcccctctagcccgtgcaggtacctcttcgtggtactagggaccggtattcgagtatcaagagtactcgaagaagcaaagacctgtgtactatcttgatgatatattttgtatttcgaatgattgtctttagagaaataaaatgagccctagatagaagtaaaccaattccaggattaaaactttaagattcaaccttcgttatcgagtgctgtattcctaaccctcctatctttatggtttgcggtcggctagtcttcccgccgcaatagaatatatctaccatcagagcgtagagcgaataaaatggtgagtatttgggtgcgttgtggatgtgttgactgggtgttgatagtcgttgatggttgttaatagtcgttgatggtcgttgatggtcgttgatggttgttgatggtcgttgatggtcgttgatggttgttgatagtcgttgatggtcgttaatggttgttgatggtcgttgatagtcgttgatggtcgttgatggtcgttaatggtcgttaatggtcgttgatggtcgttgatggtcgttgatggtcgttgttgaacgttgttgaacgttgatgagcgtggacgatagtatggacgaggtattgatgtgcgtattatagtatatggccaggcggtgaagttgagtgatggtcactagacttcagcaaagcccaaccaagcccatttctatgcacacacctaccgtcttggcattcataaccctactgattaatgttatttttatacatgttctaactaatctgtaagcccagatctcggcccgacgttttccctggcccaatccgggggttcaactactccaagaagcaagatatcaagtattaacggcaacgacctggtaataaaagtcatggaaatcaatggcgacacttaagacccgtttatataggaattaccaagaaaaagtcgagttttaccaggattttaaactattctagcacttagagaattcatgagcgccagcatatggttatatatatttcataaaagcagaagtaggcgcatcttcctatttaagtataacatttttaattgtagaaacccttatttttaggtttatagaattcaactttatacctaaagctagctaatttcttataataggtgtccttttttatagataattgatattgggaaaatctacactacttatgcaaatgctaagaattggtatgtttatattaggccccacgaaagcctagggaacttctaccttaggcctatagaatatctgtaggttggggtcgggttaggccttaggcttttgccggtccggaagtctatatataacagaaatattagttttattattttattctgtactatttggtatcacttgctacgatgatcccctggtatttactcagtatttttggtacacagcctccaattcgattgagctagtctaatgcaaatactaatatccctcgataaagctataattaggcaaaaaacctacaattagacctaccaagtatagatgaagtattgaataaagagcgctcgaaatgcgttttattgcttaggtaattatagtgatacaatagactgttccttgcagtcgaattggccgctttaggcggcttacaagccacttactcctactctgctgtagaatgcctacacctataacggtcgcgagtcaaactggattcctaataaagacggcgaagaaattgaggggcttggcttgaaaatttccgattggcttcttctatatgggagccgtcgcaccttggtcagttatagcaattacgattatattgcgagcctatctcctatgtagcaaccacaccgcactcaaattggcgaccactgctttctaggcgtggtgtcggagcttatgcaatcaagtgtattccactgtatagagaacatggttgcagcccgatcgggtctagtaagcgccatcttgaccagatctgggaaggacgattccgccagcatttacgacggacttggattagagctgcagcacacatgcacgttaccaatgccactgaaagcaatcacatgaatgctgatcaggggaagaaatcttagtataggctgtcatagatactcagagaggtcgcacagaggatggctccgagtaaagttgtgcagatacccaactcacccttacaaaggatctacttaaacagtaatataccagtccaaagcgcggtgtgtctgacaaataattgatgctcaagaacagtcgaggtaggggacgtagagaactcagccattccctgagaaaactgcttacacgcgatatatcagaagatggtttcagtaagagatacaggcgctcgggttaactcacctacagatgcagtgacatccaggggaaatggtctttacacacgttactcggcttagatagaaatcagatccagccagcgtatatccaaagacaccacaacacttctgacggtgctcatgatacagcgtcgtgcatgtctggttgattcattttcacttgttcgtttccgcttattagccccacccgctggaatacgtcgaccggctcagcaacacggaggatcaggtgaaactatcggacagcatccctttgctcgtgctctctgcttgactcggttataactcgacatcctactgtctccatttatcggttcgtacctgatataggcaattttcatctgtaggctcgagataatggggtcccgccttaccttctccttgtaagtagacttagactcatagcctgctcgttggagaaagtaggactcatccgccatgagccagacagaaacataagcttatctcggtgtctattgagctgccaggaatcaaaagacgtgagattcgaatcgaggataatgaagatcacctactggacgtcaggagtttgatcataaggaggctgttctttcgcggtatttgaatgccgagatacggtagtatacgcctattgtcgcttgagctttgtatcgggtagatacattagtacctaactgatatagagtcaactgagagaagggccgagacgatctggaccttacgttagcttatcatcgatgccgccagtagttatatagaaataatagataatatacgatcgcattagtagaggggagcttgagcagagaaaatgagggcgtcctgttatacaatacgagttagtaaggcttaccacttagacgagctgttatgacttacctatttatagagtttgcagagggtacgctgtgtatacttgagacgagacgattagtaagctttatggttaaataagctcaccaaatggatcacttacaatcctttttggtaaggcaatacagtaccatttacgccatattgtattctggttcgttgtactctccggccgttactctaaaagactgggctgagtataaaactaccggcattcctcggtcttttagagttctaggactgaaaagacgcgagatgccaactgaggacagcgaggattacccattggacgctaggaattcgatccataaggaacctattctttcgtggtgtttgaataccgagatagacagtggtttagcccattatgccttaggctttgtatcggtagatatattagcacctgactggtatatactattgactgagagaagggccgagataatgtgaatattctagtcgtttctcgtccatgctactagtggtcataaggaagggatagatagcttgcgattgcgttggtataggggagatcgagtagataagtcgtttactcgctttatattctactcgagtaatagggatataagggacctcctgttatatgatccgagtcagcaaggcttaccacttggacgagattttataacttacctatttataaagttcgcagaacattcgcttgagacgaaacgattaattagcttcgtggtcatatcttaccgatgagatcacgtataattgtctttatcaatacagttaccattcatactatgttgacataatgttgtatccagtttatcgcactctccggctgttacttcgaataagctgcactgggtgtactgggcaatttctgagagctaaaggtatataacgaacctatgacagaaattgtacagccgtaataggataaaacctcgcatagggacggtagaggctcatacactctgccgttcatggtataagggcggtaaggttaaggcggaagacacaatagattatgcgtcgtagtgatgtggtcttatctccgatctagtgataggactctcaacgggtatctttcacagtggtgatagctgctcctacagtggcacgaaaatcagtaatggtattagtgattggagcacaaaagttcgtaataactaatatagcgcagtagaggatgcgatcaattactcacatttttataaagaatagacgtcttaagcttctgcgcagcgaaacttgtgatcggatgtccgtacctgttattagcccgttccttctttacctaattctttactgtgtggtttgatacgatagggctatgaatagtgtataggcagtggctttatatagagtactaacggggccgctgtatcctcagggacttctggtataatgccgatattcactatcgttcattagcttgtatatcgtcgatataatccatgactcacatattttggtagctaaaactagggactaagagacggtaaagagctataactcttgcgcttgtgtattgtggttaattgtccttggttctattgaaatcgcattgtctgcataatcagtagaatttaggcaagtcaggctaagaatcacatacctgcgatacgaatattcgcgctgtctcttaggaagatatacacagaggctgtatagtagataagttcagacagctgctgtgacgtaggcatctttgtatagacacttggacccgccagcctaagtcttgtctctttaattagctgggatgaatggcagtatatctggtgggaatcatacctgtatctcttataggcactgtctagcttgcttatctacgatgtattctataaatgtcagtacagtggaatttaatactgggtcaaaggtggagaacttctcaagtgacccagacataagcctactcgactttttgtaatcaaatgaataaattgaagagtaaatttccggggggtagagaacgtatttatagacttcccggctcatcctgtcgccgaagtgcgctgcttagaaggacacgttaagggagaactctcttaattgaggcctattgaaatccatttcttctttctaccgcagatatttgcagcgatatttctgatgcctttagatgctcagcgagagagataattaaaagtggtgttgaacaacagcatgctgagttggtcaagaaacgttggctgactgttgaatcctccacgactctttaaaattgaggcactgagtatactcaatccgcaatggcaggctcgtatttcttgttctgataccttacctgtgagtgactcaacgttgaatcaccgaaaagcgcctacaatttcttactcgaaatcatggacttttttcctagcctcgctttagtatggtgttggttttgttgagctgtaggtctgtccgaccagactgcggaaagcgagggcactgtaggacgtgctcggcccatcaacccgttgaagcttgacttaccctgacgttgtcaacactcaattttcgaacttgtgaccatgaaaatacattaaataaaaaatctagtttttttcccgaatttctttgtttaatgacgataagttctataatattccatttatcggatttctgagccatttaacgaaagggaaagaggtatctgattgaaatgtatatctttaataagccttcatctggccctcaataacgtgagcttgatcggtttcccgaccgactatgcctattgttgaatatactgttagcagccggctgaaaattaaagtaactacagttataatttgactgcttcgattgaccgttatagtgattgtaaaacctagcccataatttatacacgtacatgtgcacagtctataagagacactaaggatcgatggaaattgtattaaacagacccgtgactttctcttgcagacaaaatggagtccccaaatagctcaataggccaggaaaaagaaggagatcagcaaccccgtgaatttcctatccccgatgagatagacaaatcaaaggaaaattctgaccatgtgccattggtaagtgaaacgattcggcttcaaacgctttttctaaccattgcagccctccacttcgcagcaggaagcaggaacaagacacaccattacgaccgagccatttcaaccgatcttgaaggttctagtagacctcgagcgcaacgatcctgagttcgcctttccagcagctcgacttatcggactctatcgacacctataggagtcatatatatccaagcacatcgatagccagaacctagagcaggaaaaccttgtcttaaaggaggctggtacgcacctaagacaaaagagggacggtcttcaggttcaacataacaagcagctatctcagctacgctttttcgagcaggcactggaattatcccaggagaagctgactagcgtcctcgataactggaatcatttttccagtctcaatttcgcaaggctcttcaacgaagaaagacaaggttaaaggactgtctgttcaaggcgatgtgccctacttcagcatagaaatactatagttaacttttcgaattaaggagaagtactgcttagaaagtatattctattcgaagtatttgcaaaacttagtgtatagaatagcctcccatttaatttatactcactggaaaattctgaataacaacgcattttatagatcaatctcacttatagtaacccagtatattatacacaaaaaaacttggatcaagggataccgttataggtagcgcaacttgcgaaggaagtgtcaagtaagtagaatgtggtaagggttccatacaaggccaaagggacagacggaatccagtgcctatcgcaccaataccatgccgggatatcgtatctagcagctgttcgcgtacttgacagagattccacgtagctgtcctaactcagggtaggaagaacagatgctcttctatactatcgctagatttccggttcaatcacactagtcggaactctacccagtatacttcgttagagaaagcgaaagctgacatgtagaggaagagctcgctagccgaagtagacatagatagagggtctggacccgtctacttgaaagccaacagcttgtcgtaagtggggtggaaaaggcattcgatcaagggagagccggaagtcttataacctacaggcttacctatatccaagagagtctgccgcgaaccttcggagtcgatagtaagacagagaggcggtattggtatactagggcactcttactagatagtgtgaaggtcgagatccaaatcacagtctactaatattagcacaaaactacactgaaatagcgggtacagactatctttactcaattcttccattttgtttaagactcgccgttgaaagctagtagtgaaatacaaagtatagtaggtagtaattcgactagtattaggagggatagaacgctgtaggctgagtaggaatttgatttatattctaaaggtattcttaacagagtacagagggttctggctagatactaagttctcgaatactaaacgcttggttaatcaacagctttgaaacgttgataatattactaaagccaacgaaacttaaccggcggttgtataggtcttgaaaaggaaggataatatttaaagtaaaaggtaaatatatagtagaaatatctagttatcgatgcctataagcgcccaaaatcctaagattttaccctttaatgtggtaggtataaggatcgcccgcttgtaaggctgaagccacactattataaagggcttgaactgctcgcttttgatcctatagtattaatacctacttattgcagagctgtagaaagatattgctatcgcttactagccatttatttaactcttaaagctgttactgctcttcctcgagttatatcttctcggtagatttgacgacgtagcattcctataggcaaaagtacagatctagtagtttaaggaatagtgtagctaaggtgttgttatagtgtagaagtttcatgaactctaccgtaagggaaccgcgtatatacactggaacctatgtagtattagtgatctcgttcgtttataatcgaagagggcctgactaacctcagcttcgatggttataccatccaaagattactgttagtagctttgcgtcttattcttatcttctgcgttatgggaaatccgacgctgtctcttggccggtcggtgatatagggaaggtgaagttagatggtccatcgtggcttttggaatgaaatacaagggacattgtactcgagggtcttttatagccggcaatgacactgagctgctgtcattgctagccctgagttcgactgccttcaaaagagtcagtgaacggttacctcgacggttacctcaactgttaacgctcgatctcatctgctgttcaccccgaattactcaacttcatgcggaaaagagcaacagatgaagccttgaaacgaagacttgcaggaactacctcctaatagtggttcacatgtgtaatctttgaggcattaaatactatacatcgagtagtgttcgttgaagttggaggtgatgttgttgggtgcgaactatccaaaaggtggtgatatagatattagatatttccgctccaaatattgctacacagcaacagatgttgaagtagtgattatcgctcgctctcatggaccagctcggactttttttttctttctctcatttctgctccctggcgacagggctgaaattgtttgatcggagttatattctccagtccggttccgcatgattcggagatagtagttacccgatctcctacaacttccattcttcaagtcttctatatatacaccaaagacgcgaagaaaatgtggagatatctcaaaaatttattctctcgttttcaaaggcttaagcggcttgtttaacatcgaatccaagtcttctttcccagccgatcaaaatttctcccagatccatctaccgtctcttctgaatcggaatgcacacgacgatcagccgccccgtccccagaggtacccgttaacgaagatagtatatcacaaaaaggagataacagagatctcgatcggtttttaatttgccacaagagggttcttatggcagacttaaaataaactgatcttcagttccagagcctgtaagaagagtaacgagctaggcgactcggttatgatagaacgaaagtcttcgggtggctactttcgtataaaacatgcgatagtagcgagagaacgtaagtgattatatactatacacgagtactaaattcctttattaatgaactttaagctcgttactagaggtatatcattgatacagcccaactatagtggtttattatcttaagaagatcgaaacgactgattgctacagctttggccaaccttagtatatacgggggattgccgttagatttgcccctttggatagtctcttccggtttttgaggccttatcgggatatatagctatactaacgcggtagaatatactacttggctatagatgtaccaaaaaagcgaatcataagtttccgatattagcttgatctaggcgagtatctaataaacgtaacattcggttagcctatacttttagtcgacggctatagcgtctgcgcttaaaatataacaattactttgcagctaaagataacctctgcgctagtggatatatgaaaggtggcccttagaacagctggaagtacagtactctatctatctagaagtcaatcggtacagtgtttagacagtgatttatattatctgccaactagatacaccgcttacagtacagcggatcgcctaaaacttagcccgatactagttggatataagtagggctccaggctataataagaagattttctggaaacgcgtttgggataatatgatattcaaggtatagtctttcggctgaagaaatgtaattttaagtagtacctatgatcatataggaacagtgcaatgtatagatatttaagagagcagtagtcaggcaattcatctcgctaggtccctattatatacctgagcaataaagtctagacttagttagctaccaaaaattcctatcgtattcctaaaaagaggtttttaatttataggaactctggtcgcatttgaaaggattatatataaagtatatgtagtgtgtagataaatgatatacagaatacttgatatatcgagagctctcggttccttaaagcgaatgagagcctaacacgtacatcgaagtttctataggtaacccgcaacctcgccgactatactacctacagtagcagccggctattctactgatatatattcgtcgcaatagagcaacagtgatctggaatgagatatactgtagtacgtgatcgctttatatttgcaagtgctagatagtgatatacgtagatatgctattcgcagtttatttcatatcttaacttatatatatatttaatcaactaacattgttgatttgactctggtaatataggggctgtttaatctttaggaactcgtctttagatcctggggctatctcctatttctaggaaaccaagctctacccctaggatctctactatataatcctgattgaatacaaactggttttaggaacggattggctaggtttgggagctgtcgcgctcctgggaccctcctcctggattctagagttaatattctgccttcttaggtcgtggaaagccctcacaagacaccttcaccagacctgcgcacaaacctgtgtaattcgattactcccggaaaggcttagccatagccccaggagccgcacttgaggtttcgggaattgctaaaactgtcaacaggaacgtgactttggttccccgaggtgaaagtattagaccccagaagctatgtcgggcttcctgggggctacgtggctcccagaagctgcactaaagcccctgggagcaagagagctcccagggccaatatttgcattcccagggctaatggagctgttaacaggggcgtgactgatcttgtgagggtggaaatggagagtctagaggttacgtacgagtttctggggctatgtgatccctgggcagctcgcattattatcgggtcggcttttaaaaccttgacggccactaagattgatggatatttacgcagagcaggtcgttaactatcatcagtctactatatcaagctactcggcatactgctcaaatattggctacgattggctggctagttaaatcaatcgataagcatgctttggttccaattaggaaactagattggtagattatcttctcaactctgtaaagtccatgaccctactcatcgcacctctctaatgtttttggactatacctccatcattcttaaaaaatcatcattaagttgtgattgtttttattcgtgatccccgctgacttgttctttatagccctactctaggaagcagctcgaaccgcctctgactgttttttagctcggtacgcgtactcaaccagtgatcgcgtaagccatgtaaagcaagacgtaggagagacataatggcccctagaataccgaaagcggcctggccaacggctccataatacataatcttgtagtatggaaagtggctcgcactgtccaaaaattcgaaggatgtctgaaagccgtggacgtggctggccacataaccccccaaggagagaacgatcaagctcacaacgatttcaatgcaaatgtagtagaatcgagcggtgccgtcctcttgtagccacttcggatagatcacaaggacaaacccaaagatggaaaacagggctgagaccaacgccacaaccaccatgctcacgacaaccttatccatgaggctttgaaatgtgatgtccaaaatagagtcgctcgagttgacgaggtcagattttgcgcggtctcgtagaacgaccgcaaagcgtacagtggccgagctgagaccggcgagggccagccaagtgatggcaaggaaaaggatggcaagacgcagtcgaatcacagccctggtagtattaagaggcattttgtgtccgtaaaaacagttgagtcaataacaggaaagtgagtctggttctgttcagggcgatatatgaggaagtaaacaatgaggcaaaaagatgaagaacgtgaatatctcagggcgccgtgaatttatatgtgctatgcgcttttctcggtaagaatgtttcaagtagaagcactatttctatctttgagatccagggccacggaacccgtgtccgatccttggtgtaaagaagctctaggaatgacctcgtgtattcctaggattgaccgtcctgtgaaatggggccagtattttatcatcatctccaagatgggtgatggattgtgcatatcatatttcaagtcaaatagtgatcccagaaaaagttccgatacagacagattttgccttggtatttttaccttgagggacatattatgtgctattgattgacgaacttccgaacccttccacaggaagacaaattcaattttacttcgtttctgttgagcttactgaatttgttgccagctagaggatctgcttccaaccgtaaggcagccctcactgttcgacgaaccaacacggccgatcaaaaatcaattttgaaccgggaaatctgacaaaatcctgctagtggtcaggtaactaaaatagctcaaggagctattttctatgggcgaaaaactcatatgctgttccggttcagtggtttctttgttcaacgttgatgtaaacgttgacatcaactttctcacattattcaccacccgtacatctttaaaggtggttatcagagaataattagcggatgtttcagcacgatattaccaagctattgtagaagagtccaaaggcccagtgctgctggaagcacaatgatctgaaaacatcctacgggtggtatcataccagcgcgctactagcgggggtattatcgaggataccaaaaagccccagtactcctggaagcgcagtaaagactccactggtcgtcctttttactgtggcttttcggacggctgaaccatgacgcaatagtagcctccgagatatcggaatacaactccctcccgcatgtttctattcatgaccaactccaatctggcagccaggttgctcccgggaatgcgcttcaaatcaatttgtgggtcgggcaacatgtgaatacggcaaccggattaaaaaatggaatgattcgaccgtcattgaggcaaaatatcagcatccgcaatcctcctgggagccggcactgatattagtaaccagcgaaaacttgatagcggacatatatttcatggtggatgcttctgtgcctttcttttgttttagtaaattgccggtgcagtatcatcactagaaagaccaagcaatgatcatggatcatgagctgccaaaggtatcaaagaggtccaataccccagccacagaagagcacaatggacttacatggcaaactggtatcgttatcttagatcccctttgcgatgaatccatcggctgacaatctatttcatggaggcaatgaatcggcggaaaatttccgtcgggtcgttggccaatttacccatgggaatcacggccacacaagccaggctctacagccctctgttaaccagtccaccggatctgtggctacagaggtagctacttctgttgctatctctttagctagcccagggtcctacacgttgcctccaaccgccatcaaggctgaaaatcaagactttcccccactgaacgcaaaaaagagagcagccgagtcctcatttctcccacgaaaacaacgccgacattcgtactccatctctcataaaccgggtcgttcgcaaccgatacatcgaaagagtccctcaagccttacaacagttagtattgaaatggtcaacgacacaattcaatacctacaaacgctatccgaccgcatcttgatttttgacaccatttcctccagggagtgggccactatgcatcttgccacacgattgctacagagcagatacgaagatatcatcgccagggaaaagatggaaacagacgctgtgtccgattttaattccgcaccaacacagcaagaagagaagtgccggaaatgtgctgctgcagatgaggagcggctgtatgattgaggcgctttctgtgtttataaccttgctcgcaatgttttgataacatggtccttgaaaattgacgatcgaataaaatgttggggaaccaagaatcggtatatttaagaacgtgctgagcttcaagtctattattcatggatagagcactttcaggtacgaagatgggttgaaagttttcctgtaggtgatgtgagtccactcgacaagcaaaggtaaatatgtgacagtccggtgcatcttcatctccaatcaatgcaatggagattagaaagatcagaaagtaagtaccagacaaatcgaggattgaagcaatagcgttttcaaaagtcgagtcacctcgaataccaaaaccagccactctttgggttattcaacctgcttcactcgtagtaatgcaatggtttctgctgtaccatctacaagaactggaacatttgcgccgttctgctaatcggttcatgactgctggtccttacaactgcgttgatttgcggccattctgtgtctaagtgccagcacattaattcagatgcaccaataggacatcacttgtaaactggagtcgactctagtgttggcaagacaggaaagcctagagcctcgagacccagaacagccgtagcagtactattcggagaatcatgcgagggcgactcgccgtgctgaaaggcgggcttccaagccaaagtcatacacgaccataatcaaacccatcggattctctcccttcatctctcgaatatagccgttacggcgttaattagagcctggtcgcgtacaagtcgcgggttatcagtaataggatatatatgtgggactacccttgctcagcgcaaaaatgcctggcaagtttatcattccccgagcctaccgattactgtgataactatcttatgtttgatcccgttcgccctttgatatgaaaaattgaaaatttcatgaactaaacaagataagtgaggccatcattataaagaagttgccgcagactctggcttatttgacagcttgtgtcttatttttttctttcgcgctgtcagtcatttgaatcctaaattccatcgatgaacagcctcctattaccgataagcgctattatgtgtaacaagatcctaaggaagttgagttagggggccattatgttgagcaatgtggtcatgtgcctatttgtatagaaatcctcaattacctcgagactcatttttatgagggctgaacagcatataacagtcgcaaaggttatatatacagatagctgtttctatgtaagccccatggcttataagcctcttcttttgacaatcggtcaaagctctcatctcttctcattgacgagagtccaaaccttaataccgtgcgtataaataaattgaatttcacttcctctctttattcttgcaagtattggatcgggcaaaacatactcccgtcattatatcatctaaccagttcacaggcaatatgatatatgaccttaacactatcaatgctcaatctcagctccctatttcgatatcggcccccactacctgcgagagtcatacggcggccaccaagaaattaactgggtcccactgccgcagcaaactgaaggttgtcacggggcctcccaagagcctttatctaccccacttgtgtggtttggaaaacattgcatccgttttgattgtaagataggagtcgccgtgggatacctatcggaaagtcattatatataaaattactggcaaagtcactattgccacacgccgcacccgcccgtctcgcatggtagcaatccggatatatgcgaaagagaatactcgaagactgatatacagattcggacgtctggaacacaggaacgttctttcattacacaaatgctatatacacaaagatctcgcgttctttttagtggatgatttgccgctgacgctcgcgtatattgtcgcttttctatccgtttatcctaacgagacggaattgggatccatcgtaagccaggtttatccctttcgatgagctattctgactctttagatcctcgacggtgtcttttatttatttacgtttggccttgcgtaccaatcattaagctgtgatcatatattgtttggcattgacgggattatcaagataggtttgttggtggccgcatccttgcattatcggactaacacttcgcagcaagtttggacctttgtatagattgcacaccaaagcaatctgaagccgcatatattgcggcccttccttcgatcacaatgcagctcatgcagaaatttgacaaagatcaaggcgttgttggcgtgattgatctggagcgatggccaatcgattctgccgctgtgggttttctgtccgctaccgagacagcaggatcaatcaagtctctgagaaatgtgagttctcccagaaaggtatcatataatgctaatttccagcagcaacctctgttgacggggaagcaccgcccaagcgaggatctggtcgttctcgcaagagcagctctgctttccagtagtttgaattgcgtgtataatcccgattctaaaaagtgaaacgacaaggatatggttcacgactcttataaactggcgaattttcatcatgctcgtatctgtacggtttcaccaatgtgcaacgttctatgcgtctcctatagttctcttgctacataatagggtattttatttctttctggcaacccacaaacacaaggcaagtccgcagcgaagactaggaaatgggaatcgctttccaaggcgagaagctgtgatactagaatgggaatttgactttccactagcataggagcgtgtgccaagatagattgatcattacgcacggcgtacttttcgcgtcaagcgttctgttcctggtagctcacatggttttgtcgtaatccagtatatattataactgcagtctattctacttactggtataaaatcgaaagagaatctagacttaatatgaacaaaatgcaaaatcattttacaaatccaataggaagcaaagaatataaaagattttattggcgatcttctgtcttcggaataacgcccgaacataactaaaagtagtacttcaaagatgtctatttttcggatctgaataggctccaggtaggctccaggtaggctcagggtgggctcagggtgggctcagggttggctccaggttggctcagggttggctcagggttggctcagggttggctcagggttggctcagggtaggctcagggtgggctcagggttggttcagcggtggcagaaccgggtgtcaactccgatggggggaaattttgtgagttccccgcacggtattgtcacacttggttattcgttacccattaaacatcgctttatgttttgtatggtaagtcttaccataccggaagaaccgcgctgtaacatacagtaatagtgccatgccgactatcaaatctttcaataccggtagggtgttgatgggcctgagctttgtccgtaaggcgcggagtgtatatcgccggttcaaagacgcctgaagactggttcccgtcttactcgtcggtcgcaacctagcctgtgctgtgatgccatgctacagtctcaagattcggactcgcaatacatgactgcttagaggcttcggaaataacaggcaaacctatactactaatataggagagatagatgcactggtggcccgccccgtcagtccataaacaacaaggcctacgtctagctcggggcctcacgcaaaccgacacagcttggcgtgagacgagtattatgcttcatacgactacaatcataaaaataaaataaaataaaccatgacatgagaaacgaggttcattcgtgtggtgatactccgtaccttacaccaagagaataccctttactcggaattgaccaaatttttggaagcgaaaattcatcattcgtcttacaccgcaaagacccgctctacaaaagctaaacaggtctatagaccccaactaagatatatgatattgcacccctaaacctgaaccccggttataccttcacagagtgagataacggagaccatttcgtatctatgtcagcccaagggctgttttagaagagcgtgagacagttccatgcaccctttctgcatggttcaatagcatagactttgactccaacttctccccgcaaatagagcactcacagcgcatgtcatttgaaaacggcttgatatgcttactgacgaagtgtcggctcagagatccagagttcttgtacatcctcagacgttcgctctgtggcagcctaggggtactaaggcaaataaagtaaatcgttggtctctcttctggagatttgacgtaaactgaagcgatagctttggaaaaagcatcgtcgctcttagctgaaggggttgaattctgccttttaggcaggggggcagtcggtagcatatcgctagcatcggcggagcgttttcgggcgatacaagaccgcgagggtgtaacctcttctgtatcacagaccgcaattactgcattgattacagcaattcgacgctcatattctttctcaatcgtcgtacctggcatggtcaggacagtgtcgataagtgttatatgctgcggtgtcatatagcctgttcgctccagctcaactaatacttctttgttaataacctttccggaaagttgtcgttcgctgtcgaccactggctgttcgttcttgtaacgctccaggttctcatgaattaagtggttcctttgccgccctttctcattgtgtagttacttaactgagcgattatactgcttatctatatggtcgaatttttgctgtagccttttaactctcttctcttgagctttccgtcgcttgcggatcattcgggaatgagggaaattttcccccgaaagtttatcaccaaactcccgctgtaatgcagcccgggtattttcataggtgcgcttcttagcatctcgaatttatttccgcgcctgcttcctctcttctagagtgcagatacggggaattttattaatacagcttaaatcctctagttgatagggtctacggggatcaatagaccaactcatcgaggaggtaaaccgtatgagctgcttctaagcgggtaggccccgtacaattgcctgggcatctatataaatacctacgctgtagtgacgaataaaagtatcgatactagcatgctgcagtatcacgttctgtagttcattagacatatccgctattaaagagaagcattagcctaggatcctatcatgcataatgtctcactcacggctatcgttgaacgcttttgctgcgctatatcggaggcagtagggcttcgcgacttccgcgaaacctataatttcaccacctcgtttcattcggtaactcagccatcctttggtaagtttttcttctggtgcaattcgaatcccaccaggctcccgtagtgcttggcaaaacacgttttgatcgagaatttcgtcttttagctttaattcctgctcactaagaccatggaggacccggagacagtacagtttctcagggcaatccatcacagggccgtctttggacagacttttgaatgcaccaatcctgaagagcatacccagcagaaaaacatgaggactgagaaccagggtgggatcaaagatgatttccggaattgggaacgtgttcctattccaaaatggtgagcaagctttgactgggtccgttggcggaagaacttcagcatgcagaattgcgcagggaaatcaggggtgaattgaatggggagggaaggaagcaaaagacaggggacattcttacgactctttcccgccaagaaatgtttttgtgaattccggcctcaaataaatgaacagtcggggtcgtccatcatttggatctcgaactaatgtcaacttgaggtcctggaagcgaagtttcaatagtgcccctggacggttaccggtgatagcagctagctggcagaaaagaaggagttgtatccggtaccagccataaggaaaggtcatttctgttgtagatagaaccactcgtgtaaactcggccacatcttcgacatacatagtcactttcggtcgaccttttagagaaaggcttttttctgttacaactatcgcaagtacctattgaaagtcagcctagtcaatttttatcgatatagatattcaatcaggatcttacgtcacggatcttaatatggacatctttgctgacgccatgtccaacctcggccttgtagatcagatgccactacttccaaaatgcgtcgagcgtgcttttggtattcactcccgcggtgtgacgtccatcctttccccgtcgctggtcataccgctaggagaagagagccttgaggaagcggaccgtctcctcggtattagagagccagaacaaacattctaccggatcgcgcttcgtgcctttgcagaacctagaacaatcagcgaaccaagcaaggtagaagtttgtagtgaattctcactggtcctagaaatattgcgtatcatccaaatgcctttgggtatttgggctgtagcgtttctgtcgaagctgggagacatcaagagactcggcttcgtggaggtagtattctggtggaagttgctcctcttcctcttccgataccagctcatcttcggactcatcttcggactcgctgcttgagtcgaagacgctgggctcggtggaggaatcagtgtcggaagcgtggtccgaaaaaacctcagaatggcctggggtagtatcgctctcgttggacggaacagaaccatcaaatgacatggcaggagggggtggatgcgatcaaagaaggtacaaggaacgaggcaagtcaaagaacaagtaaatggtagagactggttctctcttcacacttgagtgccgtgccgtcgaagagaccgacctgagagtggaagagttgcttggtagcaagaaagaacattgtgtcggggccatggcagtcgatatttataaaaactgagggaagaagggaaccaaggaggggagccatccttggttcctctccttcaggaggatggctgagggtgggtcgcggcggcggttgctatagcgcgagtggtctcggtcgggcccaggcaccaggcacagccaacggaaagcatgggtggcagttgagagagtcggtcgtgggcttagattcacgtgatgccaagcccgacaacggtgagtggaaggcttaaaacggcccccgaggcggccgtttctggcctcccattcaccgtctcattcttatgtgtaggaatatatatcctacttaaactgtggttcctacgatatactcttataagggtattaaaagctacaattagattataaactatatctataactaccttaataaacttagaagggaaaaggaactgtacttccttattatccttatctaatatacttatagctactctaagggtccctctagttattaactaaaattactctatctaggaaagaactactagtaactagaaataattctccttaatactagtaggaacctagttctaaggttagtataagttctattagaatatagctaaagtagctaaaaagatataccgaattatatatatagtatactttcgaataatatatataagatttactatatagtatatcgatatagtactagattactaaagggaaacgataattatccttatccttaccctaatcttagttagatacttatatatataagagatattaggcctactaataaagaatagggtttataatagttttctaatatattccctttaaactaatagtctttactattatattaaggatttaatactattatataagtaaaataattagaagaaaggatttagagattatagaaaagtagaagggaaagggtagtaattatactataactataattacctactataaatctattaaaggaatatnnnnnnnnnnnnnnnnnnnnnnnnnnnnnnnnnnnnnnnnnnnnnnnnnnnnnnnnnnnnnnnnnnnnnnnnnnnnnnnnnnnnnnnnnnnnnnnnnnnnnnnnnnnnnnnnnnnnnnnnnnnnnnnnnnnnnnnnnnnnnnnnnnnnnnnnnnnnnnnnnnnnnnnnnnnnnnnnnnnnnnnnnnnnnnnnnnnnnnnnnnnnnnnnnnnnnnnnnnnnnnnnnnnnnnnnnnnnnnnnnnnnnnnnnnnnnnnnnnnnnnnnnnnnnnnnnnnnnnnnnnnnnnnnnnnnnnnnnnnnnnnnnnnnnnnnnnnnnnnnnnnnnnnnnnnnnnnnnnnnnnnnnnnnnnnnnnnnnnnnnnnnnnnnnnnnnnnnnnnnnnnnnnnnnnnnnnnnnnnnnnnnnnnnnnnnnnnnnnnnnnnnnnnnnnnnnnnnnnnnnnnnnnnnnnnnnnnnnnnnnnnnnnnnnnnnnnnnnnnnnnnnnnnnnnnnnnnnnnnnnnnnnnnnnnnnnnnnnnnnnnnnnnnnnnnnnnnnnnnnnnnnnnnnnnnnnnnnnnnnnnnnnnnnnnnnnnnnnnnnnnnnnnnnnnnnnnnnnnnnnnnnnnnnnnnnnnnnnnnnnnnnnnnnnnnnnnnnnnnnnnnnnnnnnnnnnnnnnnnnnnnnnnnnnnnnnnnnnnnnnnnnnnnnnnnnnnnnnnnnnnnnnnnnnnnnnnnnnnnnnnnnnnnnnnnnnnnnnnnnnnnnnnnnnnnnnnnnnnnnnnnnnnnnnnnnnnnnaatatatataaacctatataggcttaggaaggaatatctatattattatatatctattttgatatcgatccgtaaggggtttattatataaatataggtagatagatttccttatagtttaggaccccttaggggcccctccgagactagtaagaattagtcttggcatactatcaatacattgtattccctctataaagccctttatatcttacctagttgacaggctatatacctatataacgtatacctttacatttaccctactagaaataagaatagtttagggaattacttagaatatctaagattggtcatctgatcagttataaaagtagacgttaaagagaattttattaattaagatagctcttaaagctctaaattgtaatcgctttaaaagctagggggtgtatcagaatctaggataaatactgtcatttttcatccctgatacagttaggtcacgtaactgaccaagctggtttttctgcagaaaaactaacttagaaggttttccacctaaaaaactagtcccgcagttttttacctaaaaaacatcctttcttttattttatttattttaattactaagttgtctatcagattattatattttaggactattattagtttaagggagttagagattttattaagatttttctgccataaaatacactcgccttaccaccgtttttctgttatatagtaaattagatatataaatttaaggtccctactataagtactcaaaattttaaagggttaaaatatagttaagaggtagttatagtatatataagaaaattacccttttaggataactgaccttaaaatataagcaaattttaatcgctcactataggtataatctttatctaaattaaaagtagtaaactagatatataaatttaaggtccctactataagtactgaaaattttaaagggttaaaatacagttaagaggtagttatagtacgtataaaatatagccgaattaggttagtatcattcttcctatagccctaaaccttaaagatataccttaactttaaccacaaatttcagacgctatactagccggatacgaaagataagatatgatctagaatacttaagaaaagggctttctagtgatactaaaataataataaatagtcattattttataggtacttagactctatgatttcctatatagagttccagtgcagataaatgtgaatcaggatgttgctccaaagaaggatactgcggctttgggcctgacttccgcggagatgatgtgtgtatttcaggctgcgatgctatagcagagtgcggtggtatgttgatctcccttcacttggtatcctctggaaattaaccatttgaattatagaatttgccaaggtcactgggactgagtgtccattgaatgtttgttgctctgaattcgggtaagctatgatggtgaacttgaatcctgtttctcctttgctgattttataatttcacagcttttgcgggacaactgaggaaatctgcggaactggttgccaaagtggttgcgaccctgttaatacaccgtaagcatagaagacttcgctgaataggatctatcattctaataggagccatcgctcagatcatgtggtagaaagtcgagtgaggcccggtatattggatactacgagggctggaatacgcagagacaatgcgatactgtcacaccggacaacatcttgaacgcagttggtgcatgctcggaggccacaatggtatcactgtctggggacttcacccagtaaagatgccgagtttacctggagcgaataaattatctgaccccgccagttagccagctgcttcgggtgttaattttgggcatagataatttcaggtacctttcgccactgataggatctctgtacggcggcggtgggagttgcgataccctcacaaatacctcgggagaatcgcgtctcaagtggacgtctgggcataactcccatggcccaatgtaacatgcatggccttttctaaaacctgataccatcgacgttttctagcttgcgaattacggcttattctattcttgtatgcgtaataacactgctacgggaacatcactggtcaccggcacttggagatttactctgagtcacaattctttctctgagacgaaagactgcttacagaggggattggagattggaagatatgctcgtcttatgctactcgtatacttgaagattgactggcgaagagaaagatggagtgaaattaggctacgatgatcctgacagtaacctgatgccaacctccacatttgtgttcaagtatggggaaacctggggactcccagggaaaaacccgtaccaaggctgtcatagcaacagataatcatatccaaggcctttggtaaatatgtcagaatataaatttcttcatcaaaatcaggcgagtgagaagaagaacttacttctgatcaggtctgctttgatcctggtgcggtacacgtcgcggtttgcgaagctctcccggtacaatagacggctgtatgcacccaagaatatgtttgcgcaggaataatcgatgagtagggctgaagcgtagtgacgcagctgtcgcaaacactctcaggccctttctggcaattgaagcagtcgcttgggcgtttctggtcgtccggaccaggttggtcatattgagccatcgccgaggttgctagggcaatgagtagaaacaccagtctcattttggccgattcgcaacgcaacttctttttgtctatattagattgtactgcgaatacgtcagtatgttcagaatgcacgaacctttatcaaaggggatatcaaggtaagagtatagaaagcgatcagtttcaagtttagggaacaaaacaaagctcaaactacaattcgacgactggtttatatatatgcctctttcacattcaaagtatacattcagggtaagtgagttatgatgtaatatattcaggaaaaggtctaaggttggagactgagtctccgcgaaacttgtgttacatcagtctgccaaatttgtccagagcaaccagaatagacagcaaaggttctagaagtgtcattatgagagggctgtttgttagctgggtagtaattactaccaaagaaaatcgcgcaccatacttagtagcaaccaaaatgattaggtttggaatacagtgctctcttcattggttcatggtggagaagcatgtagtgacaagtagagctgtggagtatataaattgacaaggacacctgatagtcttgtaaatttggcaaacttgcaacctagtagtatggcagtattgcggatgatgcctacacaagtggagcattgcatatacctagggggtccagagcctgttttcaataagcttctcggtaggtcgtaaatacaattccaaatcgcactcaattaatggatccaagctcaggatcgatgcgaaatgacctttttttcgagcatttccattggcggccgagggatgcgacttgtaatgttacaaaacatgacagagcgccgcgggttccctatcagtcgttttctctacgctcaaccaattgtcaattatcctgttcaaggcttagcgcattccattggaatgaccggatatattctatgattcatgtctctaccacagatactcaaagcaggcggttgaattatcatcttacatccctttttcaaaatctctttttggttcctttcaattagtcatgatgcttctctcaattaaataacatgtacgtcagctctggagcatccagtaagctgcaagcaaccccttaatgactcttgactttgcgactcttcgttaaggaagtgtcatcgccggatctttaaggcggggaggtttattaaggttacatgactgctatccagtaggaagatattctcgaggctactctaggggcggtccttgaccggcaccacagttgcagtgtcttctgcgtggacctaccggttgcatttttggtatgaaacaattcgttgagttttcttacatgcaccccaactgctctggcaatacaacagcgcgtgttcggtaagtccgccaaaaccccaactctgcgagcgtctaacgcacttgcactacagaaaccttttgatgggttgattgatttagttcccctgcatctcattttcgtttcttcgtgcaacagcgaccagagcaataagcctgtcaacgcagatatcgatcctcaaaatctcctgctcaatggatcaggataaatgacacacacacgtacaaagacaatagtgcaaatgatggaattggggtagattttgtccatgattcaaattgctgtggttgggtacaagcgggaattgccgtcggaccggaccacccacgggcgctcctgagctcccgagctccatcacacccgtgcgctagaaaaccttgaaacaacaccccccgccttagcgatggccacactaccgcgcctcgctcgaacgccctttttcggcgtaggttaccagacgcttgagtgctcaaaagtatactctccacaatcacgttactgacaatgaaggcttcggatcattgaaactccggtaatcctggacagccgatttcgcaccaccttctactgcgccgttttgctcgaatccttcaaaacaataaatttgtttagttcaacctgaagccccgagcctggagcgccgaggttagtatactgtatactactatggtagcgatatccggaaaggaaagctaaacattctgcacagagcgaaatgagtttccggtttagcacgaccgcgtctgcacaacagctggccgacaacattccctaaggcttagcaatcctcaatcagaactacgagctagaacaatgatcgcgtgttccgacgcgaagtctctacattgcttgctgcaatcgatccacctagatgacgcccaccgagttaatactaggttcaacgacgctttgtcggccaaagcagcgctgcgcattgaatactggacttggaatcaggacatgtggtgtgtgttgacttcaagtcctcttcttgtatatagtcatgatcttggccttgatgcctgtggcgggtttatcgttataatctcggatatcacatcagagaagagggcagagtatgcctataagcagcttgctaaagacatacaagaacacagataaatcaagagcgatttgtcgataatgattagtcatgagatttagaaccctctctccgcgatattgtactgcaccgaggatatcattcaagaaatacgcgaaaatgaagactacgaggcgctgtgtcaggaccccaatactaagaaggctgatgcctgaagtatggcacctgtcatggtgtgtagagcaccccgtcctgggtgcgtgggggcctgtggactagacaggagcaatgcgtgctgcctgcacagcctcattggatcatgtgacccacaacctgtatattatcctcgcatgctgcttctttggggaagtagctattagttccaatataccactgcgtatactactatctctatttcccgatcctccattacatataacattcccttaggcatttatacctaggggtctcaccaaattgtagacatccctgctctttccaagacactagcctaagcaaatattattcccgatatgatcagaactgatggaaggattatcatttgaccttataacgtgccaggtggtgaaaataaaagttgaacacttgaactctattttttaatgggccctagccgactgatgcggaggaatgtggagctctcccgtgatcccttggagccttgaaaccctctagattcctcccatactatgatctcccttgatttgtgaataagaggggggaaataagccatctgaatactttgagcgtagcatagatttggcgcttgttaataggccttgtagtgctcaacgtagaacggcatgaggattccgcatggattattgttcgtttcgtttcgtttctaacataaatttacatttgaatattgaccaactttggtgtaaaatggacgagcctttcttgcagcaaggagcatatttttgtaatgctttttgtactcacgatacaggaacggaacatatggggatcatgtaacattcattgtttctatacggtaagcctactcaaaacttggttccaggagataaatgtggcatatatcttagctatagtattactcttataactattttagttatgccgtcatcggatagacagtgccatttgaaagaagctgtgagaggaagatttcataactaccaccagagtcctctccctacctttgtcggcctttttgaacagcaattactagtgacaataattcggcttcttgcttctgatcttcgttgaggattagcagaaaatgtgaaataggtaacattaattttaaaaatgaagaaagctaaggaatgcaggaaggaatctcctattttggataatgacgcccactgtccactgggtgacgagtcatggaataagatgtgcaagttagcctcctcccaatgcagccaagtggccaatgtaacatatgcactacgagtttggaacccgcttaagcactgcatatggaagggcattgcctccaatatagccaatcacgctatatgtttaggatcacgtttatttgttctctgggaaagtgtcatgcattgtatgcagcggtcgttttaatagagcagcaacgaatgtttagtggaagtttgtccaccttggtcgactgtggttggaaactagtcatgaactagtggtaagacgttcccagcgcgtggtaggcgctggcattatttacccgtgcgctatgttgtatgaccctggcttgctatagctcctaaacatgtgacttccttggctggagtgcaagggtcgtggtcatcaacccaactagtcgtaaggagcggagtagaccattcgtaaagaaattctttcaaccggttcccaaccaggtgatctcttgtcactacatcattcactgtggagcagatgttagtttggtatgctacccatgttgttcgaagtcatcggagcagctattaccgttattggggctattatgtgtgtttaactaagcgagagagggggttggttttccgtatttaaaatacccacacatttagctattgaggtagttttactgtcttaggcaggacaggacctctctccccccttctctctcacggtcaatctacccagttcaagatcaatcatagagacagtaagagatataacgcccaagtcgagatcaatatgcctgctgacctggcaggggtaagacagaagggccgcatcggtggacgagcgatgaagtcggtcaatatagaaaggtagtttagggtgaatcgtccgtggattgacatgcgcaaaaaatctcccacttaaaattaactggaatctgaatcttatcatatggtggttggccaacagctctttttccgttgataaatctagaaggtccagggatctgatactctagcgataaatacacaatcattccctgtacgtctgcgcctcatttacctacttacgttgtatccgaacaccacggcaaaaaaacaccaatgtcgaatttactctgtagagaactccgtagggctggataagtctggcctggcgcgaatagattgtcgccgaacccagaatctgtgaaaaagaccttcggggtattagttgtcggtcatacgaataaataagagacagcacaactgcatgataaagggcgaagaaggactaaaaaggaaatactcacagcattctaaagaataaatattaaaaagcaacttgaagtgccaccctgaaatcgatgctgactgggacattcccatcttgaccgaggtctgtaaggcttcaatagcacaccaagcagctcttgtacatgtgcttgagcctgatatttcaactttgacgtcgttcaagctggaagagatggtttgcacgtttcgggtcgcaagagttgatctgaggggcctgaagtttccacacagtaaaacatgagcctgacgatatagggaaagcgcattcgctgtaatcaccccgccggggtatcttggagagcaatggaagtctgggatctgctcggcgcacatacgccacctagccagagcttgttcaagtcgttgcgttagtgcctgggtctgatctaaaagccaactatcctggtagagatttgccagtggttcaacgatgccatgcaaagtcaaataagacgcaaaaatgctcagtcgaagcgagggcccactgagaggagaaaattttggccattgcgactgagaagcgaatcagcggtttgaaactggactttctagtctcggaccacgcctgtggggatatgctcatccgttcagattcttcgcatggcagaaaacaatcacttatatcaacattccaagagcagttaactgtttggaaggcgacgcctagcgcacccagatagacgtatatcgagcaaattgctctgtcaggtgacgttagatttgtacagattgtccaagataagatgattccacataccgcacagttgtctcaaagtcaatctacttctgccatcgtcgcaaaagatcaacgtctcctccgtctgactctggtgcgtaggggggcagctttctgcgttcaaaatgccctgacaagtcggaacattgattagtagctttactggagtagatcctccgaggagtgacagtgacaaaatactgcataagggcaccctctaaacaaaggatttttctacttgtcacaattatctcgatcagaagagaggctaatgacgctgcttcttggaaggtccggaaatctccactcttcgtaccgtttgccataactagaagaagacactgcagtacccatagctttttatctgcgatagtgagctggctcagttgaacctcttttgagtcagggaacatgcttcatcaatgggtttgccttgcgtacatatttgattgtattggctttagacatgcgatgaagcgaagcagcggttagctcatcgtcgtagtagatggcgccgatggatgccatggcaaaaatcatacatgggggagctaggtctgccttctaggttgacgtatggatacatggtatgtatatgaggagatgtgcttagtactctttctaatgtgaagcgactcggaaatgtgaaactgatgatatcttcggtctgcaggaatatttaagcactgtgggctgggagatccagtacgggcatcggtctgcggcttaccgacgtaggtgtatggaacgcggaacctaatttacgccacctgtgctccgagatggcaaaagagcctttccatgctggtgaatctattaccctcggtcgtgatttcgtggcagcatgatgctttgggggagaagcaaagctattcaatgccaagtcggattgcaagttttcttgcgctctctcggtcgggttttatacatatcagactcgaaagatcgcggaaagttgagagctgagatccaagagcctatggtcgggctattgatttccaacatgttagttgggtcgaaggcgggaagccaccctgtagctgttgagggctcaaccgcattttgcattttatgccgtcaccgataagatcgtgggactggatgtctgcatgaatattgattgtatggactctgacggatcattattgacttcctgactatgttgttgggttcccatgtggttccgtgaatggtgccttttcaagacatcttgccgaatgaagcttgcattgcaaggggtacatctgaacgggtgctcattgcgatctggaaaacatctggttaatatctcgggcaccgaacggtttgacggacctaggagagcgctcgtgtctgcaaatgtgttcccgccgagcgaatgcacgatcacagtaggagcattgttttccacggcgcgtaacgtcaggtcccgtagtatcactcattctcgtttattgacatgaaattagaatcgcccctagcatctctcattcccagattttcgtgttcctagtcttcaaaatcatgacacttgaaaggttaaaatacctcactattaggtgacaggaatgacttctgtactgacaggggccgaaattgccaaaagtacgtctcgtcctcatagaaagaaggatggccccgcttggttttctcccttcgcggatgtgtaagccgcgtaagccaataagatcggacagattaaattaatgcctaagatataaggcactgaggtcacatgctatctttattcctaccgcttctagcttcctgcattcccgttggtcactttatgcctgatattatcattggtctatttcctcaccgctcacgggtaattctgccagtcccatcaaaattcttggaccaacatagagtggtggaagcttgtacttgaacaaaagttttaagaatgtgcacgtatacaatctacactgaaaataggagtgatcaactaaggtaggcactgtgtaagatagatgatgatctagctactaaatggcttcatgtggacgaagacacaaatatcgtctcgtttgtaaatcaggagcagtatgttctacaaaacaagcaaggagagatatgccaacagtgtgcctgtaagacggataagggaaaaataagttgtaaataagagaggcagcgggtgaagaaaccaaagaagtctgtctgccaaactgcgtgggaaatagcgaacgcccaaatgcatcatgggtcattcataatgaacatagattctataatacatcatcaggctgataccagatattcaagccggcattatcaagatcccgctaatctagcaggtggtgatgtaaagaccgagactagaaaggttgttaactaatatccaagcagaaatataggggaagggaacatacggagaggggttgtagtcttcgaagaagttaaggtcggtgcttccagagttcttcatctcgaaggcgacagtctggccgccaggacaagcgaaggtagagatgacgtatgagttaccgggggaaacggttatgtcgccgaggtcctgggacacagaaggcaggttgttaaaggtagtagactcgtcgacagcggaagagagcttagcgaagtcgatctttccgtcaccgctaaagctataggacgaagtctcgaggtcctggagctcggggaaaaggaataccaggctgcaagttttaccggagtcggacgagggaatgtcgaagttgaacgcgctcgaaatggtggagctcacggtaccattgtaggaagtaccaggcgcagtgtcaggcgaggaggagtcaacagggacaatcaggtgggggtattcgtagttgccagtagtaagagtagtggggcaagagctgctagaggatccagtcgctgtagtagaagatgcggaactggtggggacagatccactgttagaatcgctgggctgtgagcctccaccagcactagatggagaaggaacagagcccgtgggaacagatgcggtagagccggagccagagcccgtggccgtgggagcaggggcggtagagccggagccagagcccgtggccgtgggagcaggggcggtagagccagagccagagccagagccagagccagaaccagagccagagccagagccagaacctggactggacgagacagaagagaaggttgaaggagcgctagaagatccgacagaagagggagcagcgctagcagatgacgacgagctgccagaaccagagcccgagtttgaacatgagtcggcagtcaactccacgttcacgcaaccggtgacatcggacttgttgggggcagtgtagacgttcagaccaccgttttggcccgtggcacaggcaacaaagtccttgctaccgttgtactcgagctcaccctgggagctaagagagaagccaggagtgggggaagcaccctcatcacactggaactgagtagtaggggctattcaatagtcagacatgctttagttgacataagttgggatggtcacttacgggtgagaatgcagccacggccgtttgagtcagtgatagcacctgtagaatcgatgcagtattgagcgggcgacaggctgctgtctccaatgcggttctgaccatcgcttagctggccaagttcgccggaggtaccaccggaagaggtgaggtgaaagcagcagctgtcgctacggctaacgagggcgttggtgctggcagcgaaggcagcgatggtgatgaagttcttcatcatgattgctcttcggcgaatgtggaagggttggtaataacgaatgaacagaatgaatgttcttttgaggaaattaattcaaagatcttcgagtgtgatatcgaccacgatagttacagcagaaattaatctagaggactcggttcgtggaaggcgcatctttatagaatgcagtggattagagatccagaattatgaatcaaggaattacatgttctagtaggcggcgaaactctccgatgcaaaaacaaacaaaaaatagaaacggcatgctgtcaggcaacctggcaccatgtgagtgaattgcaggtccgaaccagccggagcgagatgtggtagaccgtagtgacatagtaggcgctgtctaaaccagatatccatttcattaaattgtggagtagaaggccatgcttgatagtccacttacaaccaaacttggacatggatgtggacccttctcaaggtccatttgaacctgctatccacggtgcagttgaaggtggcaaaccaccttttccatggatcgttcgtggttgcattctccgaaaggctcagagtggtctaccttcggatagaacggatgaagttatatatcttcggttagagaccgcgggactttgcgagattgatcgaatgcaactgttaacaggtgggcagcattacatggcatggtaccccgatactgtcttctagctttggacaaaaatagctaagcataaacttgggtatgcttggtatactgccgacttccagccaacagaaaggaaatagatcgctacatacagggctaaaaggactagaccacgtcagtgataatagccgattcccgaaaagtccctgtctctggataaaattagaataagatattgagagctgctacagtggaccggtggaactgggacttatgcatcgtatgtaattggacatggacaagtgtatgacctcaagacaaatttcaacaacaaagaagaaaagacactggatgcgaagcggtttttaccaagtggagcccgctttattcaacaatagtcgcggctctctttgttccttgttcaccttgttcgccaccaccaatcatagttagttgctaccttgtgggagttacaaagtacattgtttggtttctgttgttcgtttattttttgtgcgtaatagttcacgccccacgatgcgtgtctttttttagatctattccttagactgacgatcaaacatcgctctagatcgatcgcaaacaccctaccatattgttttagacaaaatgatatcaattggaattcggacatattatttgatatgcatattgggtggttagcaagccttccccaatgctctcataaaaccccttattgtattgctttgttcaaatatggattccctggctgttggtcgttctaacttaaccccgccatgtcgatcgcactatggcgatcgtactatggacgcgacgatgagccaattggggagtggggctccatataatgacatacatctttacataaaattgacacgtcgtgcgtcatacgatggtgatgtcaatttcagattccataccccgtactccgtacatctaggtatatccacatccacccctttcgactccacaaagacaatccgatagcactatgctgtcaaagacaactactttttttccaaccgcagctgctatcaaggcaggagaagcttcaacacagtataatgatgctattaactggacggaggatgttgccaaaggttgctcatataacccagccatatcacaacttctgttttctatggctgctattcatacctcagtggacatgctcacacaggtccttcttgacatccctgcccagtccgacctggtcagagctctgcgggaggagataataattgtgactcgggacagttaaatcaaggaaattcaacgactgaaggctgtcacaattaggaagacccatcatatatttccgcttttttcaaatattgactgatcctagccccgatgccccgtcttaccaccaccgacgtttgagttatcagatggagtcttcgtccccaaagactcttaagtcttgatctccgtggatagcatgtgggacgaatgtaattatgaaacctggagaagttcgatgttgatcgttttctctagatgcgtgatgttcccggccaacagactgttgcccaaattgttgcaccttctccgattcacttgggctggggctttgggcagcatgcctgtcctggaagatcatttgccgccaacgagacatgcagctatatgaccggacgattatgggcagtgggtgaatagtacaggctctggaaacaatccatggcgtttatttcggcctttacattacccagaagcctgtcgctcaaactgtttggggtgcgatcctatataagatcgattccaagggcttcttcaagatgagcactagtgctgacgcacacattatccagactacataagacgaagaaccgattgacctgggtaatggtgccaatatgcatgtttcatgaaagaggctacgggatacgggaatgggcgccacagatgcagaaagataggggtgcaatgaacatgtaccgttatgcctagcttctcaagggtcagctattctaaattcacctgtgaaaacaatgtcaaggaaagtagagaatgttcggagtcatgaatctatatttaattacattttattccgtgtttgaagcctattgatatctaggtggttttctactatcagatatgcaactattatgatcccatgccaatcagacagccgagaaaattatgaatgaatttactgctctttctgtcactttttcattgttgatgggtacatacatccaagcaaggcagagctgttcaagaatgtacgagttgactacttctacgaaggggcatagcgcgcaggcggcctccgtcgatatcaaaacattcctaccgaggaatgccgaatatggtctaattggaggaacaacaataataaccggtgaatttgccgagcatttgcaagttcttggcctattggcctaactattgtagcagcatatatatgatagctaatcaagatatccctcgttggtgttcttttttaccaatgtccgatcattgtcgacagtatgcaaatatataataccttgctcagcggccttgctatccttccgggagctctagcttcctggcctttcttggatcgcaccaaagagatatcgacaaccatctatcacaatgaccagcccaatgtgaaagtcgagaccatctttcaatttcccaacaatggctcatggattgataatatggttgttcgatcagacggcaatcttctgttgacgcgtctggacacccccgaagtttggaatttcgacaccacaaccggaaatgcgaccctcgcctactcgttccccaatgtcaccagctgcttcggaatcagtgaaattgaggacgatgtcttcgcagttgttgtgggcaatttctctcccaagaccttccagccaggcccaggctcgttctcggttcataaattggattttaccaagatcggtgctgaggataacgagcgcgcaccgaaattgccaatggcctcggaaatcatcgcgatgccagaggctgaggccctaaatggcatggccactttctcacaggggtcaaatttggttctcattgccgacagccccaagggagtaatatggaaggtcgataccaagacaggagactattctgtcgcactggatgataccacaatggcaccggcggagggtcaggctcttcctctgggtgtcaatgctctgacaatacttggtgactatgtgtactataccggtacaacacgaatggtatattgcagagtcaaggtagacaaagatgtcaaacccatcggagattttgaggtcattgctagtggattccttcccgataacgttgagatgaccgaggatggcattgcgtatattccgacagctccgcagaactctgttgtgcgtctcacgccttcggggcagatatccctcgtcacgggtgggcaagtatctacgcaactagcaggtccaagctcagctcgattgagcaaagaccgacaagtactctatgttggcaccaatggtggccaaattgcgccggttttgggctcattcatcgagcccgcaaagattgtcaagatctcattcgaaaaatagggaaagcctgatgcttctagggacgcttggaataaccattgtggacattcgaagttgacgaacgaaaattgatgggaatattgggtttctcggccagcttgttgtataattcgatttatgaagcattctattcttgaacacacgtgtctctctccgtcatcgttcacattccagattgtgtgagcaaaggaatgagagcctgcgaaggtatcagctttgtctctgccttatggtcgaaagtgagatagtatcctcactcaattgtatcaacccaatgttgtggatcttcgcacgacttaactcacgatctcgagcaagcgatgtaaagccggcctgtatataacagtataatctccaccgtatatcctgtaatgacagcgactctgtgatcagctatgccccgaagttgggctactttgacccagctgagctcgtgagtgactttggtctagttcattgggaattgatcaggagtatagacgaagattgcgaacttgtttcccgagccaaaacctataatcgtgatacatgcctttcataccagggagctgatttcgtccatgactccatgtggagttagccaaatcgaatggccttcataggcatatggtcaactcggagagtatcggtgaaaggtggcaaactgcgctaaaccgatagttatagtggtgtgcaccgcaatgtagctgttcgaagtcatgtgacttctctccaacaactattttagtcccagcagataggtagtttcctgacggaaaaacggtggtaaggcgagtgtatatgtggcagaaaaatctcaataaattctctaactctctaaaactgacaatagtcctaaaacatgacaatctgatggacaacttagtaatcaaaacaaacaaaacaaaagaaagggtgttttcgggcgaaaaaccagcctggtcagtcacgtgacccagctgtatcagggatgaaaaatgacagtattcatcctcgattctgacatttccttttctctctttacgcaattcatgagaactttccagagcgtctacatttcatccgtagactcctagattcatctccaatagtagcaatggacgaagaagctcacgatagtaagaaccgtgttgacctgactctggtgatgtgcttgtacctcaaacgactgaaattccaccacgctctctcgctgaggttccggacagtggacacctgaggtagccgcgaaattattagctaagcagtgccagccaatgacgtcatattgtgatgtctccccacgtaggagtaacgtagagtaacagcatgttgcagccttacaggaccagtttctcttctatcatacactcgaatttccaatatcaaaatgcctggacacttcggtcaaaaggtcctcaataccttaggtctcaacgaccatggcaatcaacaaaactcctcggccgtccatcttccaggcagactggctgtgaacaacgacgagcacggattgtcttcacctcctaataatggcacataccctcgtctctgcaggctctcagatggcaccatcctctcgtcctttacccgattccccgatggacaacgctcacttcgcgtcgcgaaaagtaccgataacggccgcacgttcgaggacttctccgaggtaaccaggggcgccggcgacgtggataacatgttcttgtgtgaggtggcgccggggacaatactagcggcctttcgcaatcacgacaagggtccaaatggccctacgtacttccgcatcaccgtctgccggtctacggacggaggtcgggtctggaaatttgcctcgcaggcagctgagaaacgccctcccttgggtatttgggaaccattcatgcgcgtcggacgccaaggtgaagtgcagctttatttctcgcaagaatttgcacataacaaccaatgtaccatgctagtcgtctcgcgggatcaaggaagtacctggactcaaccgacctgtctgcatggtgacaaagatcctcttcgcgatggaatgtgcggcattgcacgaacttttgataacggtcgcgaggctcttgtcatggtattcgagaccacccggtacggacctttcagtgttgaagcgcttatatcatacgatgacggtgccacctggggttggcgccatgaagttttccgcccacgaccgggtcataatgcaggctctcctcaaattgcctcttttgctgatgggtccatggctactatattcatgacagatgaagattccaagcacgtggaatgggtgaagaatgcctctatcaaagtcgtatttgctggccagccagttgatgggcgggttcaatggagcttgccaactcttgtctctccggcctccagcttctggcctggaatcatgacattggatcaccacaacgtgctagccacttatgaccgtggtggaccccttgcaaagactatcacctggcaccccgcgtaaacatttgatcccaggggtaccttctatctagcgagagtctgcgactgggttctagggttttcatacacattctttgttgtctaagtgggtggcttgtccttcgcgtgatactttgctgggcaatctccgtattccccgcacattcccagtggacttgatagtcccaggacatgcatggatggatagttgaatattattccatctcttatcaaagagcacacttgtactccacagtccactcaacaataatacgctgtagcatccatatggtgatctctctttcaagtcagctttttcgctgcccacctggcagtcaatatccgagatcggcctcacctcaccctgactcgcgtgtttcacatcggatgccgggccttggaggtggcgttcggttttcggcggatataaactatcccggtggctcgggattaaccgtatggggaaattgatctcggagttaatctgataatctgatcggattacaaaaagggccagtactatttatgtataaaggttcttctgggtaacgttggatgttcccttcaaaacttcatctttcgaaatgtcgaccccattacggaatattattgttgttggcggctcgttcgtcgggcgtgtgggttcattctgctgtacaagatgaaattcaactaatggtcaatacagatgacagctcaggagctagcatccattgtgccttcaacacatcgggtaagctatcactgagatctaccttcgaaaacgaaactaatggtttgtgcaggtcctcttgactgagccacatagccatttccaccaccttttcacctttgtaagttgacttcggtaccagtgaacgttcattccactaagccttcgcagctaacatgccccatagcctcggtttgcgattgttccgggtcaggagcacaaagcattcattccgtacagtggtatcttcaaggcgtcgcccaatccctccaaccatggcgtagtccaggctcgcgttctatcggtcaagcccaatcatattgagttggaccgtgaatggcatggctcaaaggaacttccttttgactatgtcgttcttgcgacaggcacccgtctctccaagcctgcggctatggacgatgatgataaggcatcgtcagtcgagtatctacaaaagcatcaagctagcgttaagagatccaagtcgattttgattgtcggtggcggtgctgtcggtgttcaaatggcgaccgatctgaaagaatattatccagacaaggaagtgaccgtggttcaatctaggccgcaggtgatgccgaacttccactctgggctccatcaccttattaagagacgatttgatgagttagggatccgactcatcactggctctcgagtcattgttccaccgagtggatttcccaacgatggtagtaccttcgatgtccatctcacaaacggtaacaccgagttcacgcaattcgtcgtcctagccaccggacaaactccaaataaccagctggtggcagacttgaagtcttctcgcccggatagcgagtcggtcatcaatccagagaatggatttattcgcgttagacccactatgcagttcctagatgaggaatattcgaacatgtttgctgtgggtgatattgcagataccggtgcccaaaaggccgctcgtccaggctcaatacaggcagcagttgtcgcgaagaacatactggctttaattgaaggacgcgctgccgagaacacttttgttaagggacctggggccattcatttgacactcggcatggtaagtcaatcaaccctttatggagcgagatttgaataggctgactgttgttttttagaaacataatgtcattttccgcaatcccgatactgtggatggtcagacagagccctggatcaagccaaaggatgagtaagttccttcaattccttatgccacgccaggagaagctaatatatttaccagtggccgagaggatctgaatgtggaagctatgtgggagagactgggtatctcggttgagaatcctcgtgaatatcacctataatcgatcacgatgagtgaaagaaagggaaattaatgccacagaggtctataaattgcatagggcaacagcgaacacgtcagaaactatcatatattattcacatccagtaaccctatcgtgcgaagacgacccgagtttcccgtggatcgtgtcaatatgaagaaattggaattgtagaagatcacaacattctgtttaattgtttctctggcaggcagcttgccgttcagttttctgtgttgccagcctctttgtgtgcctgcagagatgtgggatctgtatagagagattataatcattcccttagtatattgctatcacggacaatgcaaatcgtcgggccagcctagttgtttattatcagacagcataggttgattcttcgcaaaccatttgcagtgtgccgttatttgaaaatccggactaaataataataaaatcgcacatttaacacaccgcgatggaaatatctatagtagaacgacttcaattcactagaattgtactatctagacttgggtttgggtagggaaattcacccacctgatagcaatgggttcagctttggtgtttcataaaatatatataaccaggcaagtcaagttgattctcggataagtagactgcaaggggacctgccaggctcgtgactggttgggaatcaatagttgttctgctacgtctgagggcgaatgagaaactattaacgtgaaatccagtttgatttctgcttcgtgccttgaatattcgtgccccaggaacgtgctaagaatttccaatctggacatcgggaaggagctatttccgacgatgcggctttgttcctgatctgcaccagccttgtatccacagtgcggaagaagaagaatggagcttataggtaggtctactgcatccccttgatccgtcttgatccaagtggacgtgcgagcagcggccaaggaagaagggaaggggaccttggcaattcagcccacacgggtaaagattccgtgcctatactccttctcatttgcgggtcgggtggaatagggtaatagtggcgtctaccttgtccgaaattcactgctatctttagtccgatagaaaaggtcggaccatcgtgcacctaggccgtgttttctagtgggtcactccgagttctgcgcattttccaaatctgtgcaagatcctcggaaaaccccatatgatgtcgcttgaaggaacgacatgatctgcgttagagtaagagtataaggcctagagggatcggaagataaatagtcgccgatggtaattgctggtggatatcgatttccgtattgagtgtgttgtatgcattatcactggcatacctagagagcaggtcttcacaacctcaggaaggaagatcaattgtgtttgctagtgcgtcgaggcattgccgggatgcacctgtgaccttgccagacctctttgccctgtttgtgatcctttgtgctttaaggcctttgttcctttatgtctatgaaattattagagacattcacagcagtggttagatcgccattaggaatatatattctgttgatcacttctcatttactcagccatagagtaaatacagtctacatccatcatttactccgttgtactccgtatggctttgctggatcacttagcacctctcatcaagtctttcttccgaaacaaggatcggcaccgtcggggatgtgaggcaggtgggtttcataggcaccgctgtcccttagcggcgggctacggtgggcgatgcggcgggggccttataatcgccgacccactccagcccacgtggtgcaggacgaagtgatatctccttcgcttgtgtttggaaaaagagtgacggcgaaccattaggctattatattctacagggcaaagcggtgttttcaattataaattgagaaagattgtatgattcagtatgaacatgacttagatgactttggttcacatcatcttcaagagaacgagaaattcagactcgagttttccatgctcctccaccactcattgtaatcacagtcacagccactttctactgtgaacaagaggtaacaactcatgccctgtaattgatggtcacgtggcaactatcgcagtttcccgtgccaaaactgccaatccccacgtcacagctgtccataatggtagtcatggtattcacgatgtcttggcctgagataggttggtctccgctgccgttggtcgcgtacttcacgtagcagttgcctttgctgaactcggtaccgtcggtgtatgtcgccgaagtatcgatggcattcttcgcattaatgcagttctgaggaatgagggcaatgcctgctgcaccggagccctcacagctgcgtgaattgtcagtaattggtgggcttgaagttatagaatgtccactcacttgttgttgtatgctacaacgtgaacccccattgcgacgaaggtcgccaagatctttgaagcgtgcatgttgacgaataattttgttgttgggaaagatgtgaaggctgtcgagtgttcaggagtgaaacgaatttgactagtaaaccataggattcaatggatcggcccatgctttatacccgatagttactacggcctcctatgtcacttttcaaaacgatcgccgcaatctttcgagttagaaggtatgccgaatggatcagcatccttgtctactgactatctctaagcaagtgttattgacccattcgataaacacacgtgtttctctcgtcaatctaccgtgctaatgagtggagacagacggagtatatttaccatccgtgatatatggtagtctgtttctatcgttaaaagtctgcgggatagacggttacattcgccactccaggctacgtggatgtctactcaccaagccactgcgtcacctttacccgattaggaaactgcccttgggaagctcaaggtatgacatacgtattgcggatagcaggaatgacccattatggccttgagtgatcatatatccttatagatgtggtataaaaagttgccatttctccgacctttacttaacttcaacccacaagtgtcaatcgcaaaatccatcttaccatcttaccatctatcccacatccgtgaaaatgcagctctgggcttatctccttcctgtggccaccattggtcaagtagccatggcctacagcagcaagtaagtattacgtctacggcacctatctgagactgctggtttctaacaatcttcagctgtgaggggtctttcgtccttgacacggacctggtttccattgacaaggactgcgcaaaagccatctccaatatcgacacatcggcaacatacaacgatggcagtcagttcagtgagggccactgttatctggtctatgctacaaatggcagtggtgatcagcctgttagcggacagacgattcatgacgttgcccagagcattcttgatggctgtgcaaagaagcacgggagctatggaactggaaactgcgatgcctgtcatgtcactgtcaattaccgatcctgagaatgtatatagaacttcagagagatcgacgcgagatttccgttatctgttctcttttttggcaaagatgttaaatcagagctcgaaatgcacggtatacacttgaattttgaagtgaaaatttggttcaactactgcgcgagtcctcgtgcgcgtagcaaactgttgttgacttagatcaccggtctagcgatattgtaagcaatatatctgaatgaagttggccttgggatgggtcaatggctcgcagatgactttaatcaagtaattaggtggaaattttgttataacaagtgtttctaaaaagtaaattgatttctgcaagatttttcagatgggttgggtttgcgttttgttctatacacaatatatctcatttgagcgctgttggcaaagaagaaacactccagaaaggtcaaattacattgaataagctcaatttccccgaactacatctcaaatcacacaatatcatcagcagtgcttgattccgtggagctctggcaagttgactagagttcctcagtctcgggcttttcctcgtctggatgattctaatgagaccgatcacagtattttggaagaacaaaggagcgctatccgagtctcgatggaattgcccattgataaaatccccaacgtcaagattattcccagctgcactgcaaagatgcttctcttatgagtcaatgtaatcggccttcctcggaaatcatactgaagtttgaacacatagcatgagataaggaaagtgcggcattgtatagtgaagggtatcagttcttactgttacgcttcgatgtgaaggggaacccacgtgctgggtggcattcttgatttcataattcaatctgtctcccgaggtccttcggacagccctaagccggattttgagacggtgtagtattaagacagatcggcgagctttgccacgtccgcgtggagggctaatggagtcattgcctcttcacgcttcaatcttcgttctgaataaattgctggagatcagcaaacaattccacttcgacagagaaaccaatgagtatgatcaagtttcgtgggggccatttagtttctacgtcattgctcatagatctctccactctagattagcttctactctagcaagtagtctgtaatgacgatatcttccgtattaggaaactcctacggctgaacttactagaaatattcgcaaattaggactccttaaaatatgcacatgtcgaatttgccactcaggggtctttcctgagatatttaaaatgtgatgtgggtgactggtagagccaagtttcccttcaaaaagacgaacagttgttattgaaatagacgttacctaccggccagcctgcagcttctcctccaactctgttgttcaaacctttcttgttccgcaaaccccattttctcgagctttctacgatgcaacttattgcctacctgatcggagccgtggctcctgcaatgttggctatggcttacaatgataagtaagtttacgtcctcttgtccctattatttctctagcagacttggctctttcgttcggaatgttaatgagtctttagttgcgacggatctttgattccagcgaacaaagacgattgtctcaaggccatttcaaatgttgacacgtcggcaacatacaacgacggtagtcaatttagcgaaggcgaatgctacctggtctacgctacaaacggtagtggtgatcaacccgtcagcggacagaagatccatgatgttgctcaggccattgtcgacaattgtgacatgcaacatggaagctttggaaccgaaaactgcaattcgtgccacgtgactgtgaattaccgctcttgagggatggatatgaattgactactttggtgatatgtaacatgctatactgttgatgggaagtggttgggctgaatatgcgaatgaatgatatatcgagaacttgattactttccagactatgattagtagtttctttagagatgttgttctaaaattcatccgaagtttgtagaagtctaagcatttcgcactcccgatttcttcacggctgatggcccccctcgaggctttccacgggtgcttatatcttgaacctctgttggcacaaacaagacctgtatacatggtggaccgcaattcctaccgcaggattcgcctgcgtggagtggagatgaaataagacattcgatcaaaggcaggataacagccacatggtcaagtgctgcggtagcctaggtatctatgataagggcattgatgtatttctggcattctgtcagtattaacgagagcggggggaaacgagacgtgttccgccttcgagaaacatagtaaaaggaatcaagccactctttgggattgattattctcatcgtctgtagagcgtgatctcatcaaatcccatctcaattcgaaggccctggcgttggtctccggtcctctgggctccacgagggtcgggtcgaagaatccggacatccagagtggccccgattcttgtctggcacctaaaatgggttatcgagatgtcggcaaaacaccgaggtcatataagcgaagaagccgaaccccgccccgtatccgagtacagactcactccaatgaagagcattgactggaagagcaatggtgacaatgtgccattttgatggttactttgcagatctacctgatcaagagttggaaaacatggatggagccagtcaaaataagcctgaagtaacgtatcacagatagcaggcgacaaggatacgagggccttttgcttctcaatatttgcttagaatgccccgaggctaaggttatatcaagttcgcgaccaacaaacgtcggcagcttaggggctgccaccccgagtacgtgataaagactgtcaagtcgctaatcttgaagcttagggttacgacgagtgcagacatattgatatataattggcgctcatgggggatatgggcggtttgggtaaacaacatcgcctgctagcaatagagaactcgtatggcctcatttgccaatcagaagcatcaaattatctgtgtgaattattgggctcttataatatttgttgtatataggatcaatctgatagacccagctccgctagaatggcttcattgtgttctccaacccgtggaaccgaacccatctgagcgccatatccacctttttcggtggaattggttgatccaggaggcaaaagagccgggatggctcccatgggagttttaaccctggtccaccgctctcgtgcttgaagctgagcatggtcccaaacatttttcatgtcgttgacactagcattagcgattgacgcttcgtccaaccgagcgattgtttcctctgctgtaaacttcgagaacacgtcgtggataatagatttgagctcatcccgatttcgagttcgttgtgaattgctcgaaaatctaggatcgatggctaaatttggttgtgagaggacgccgttgcagaaactaacccattccctctcattctgaacgcccaacatgaccgactggccatcaccagcttcgaacggcccataagggtagatagccgcatgcgaggcacctgctggcagcggtcctggagcgttgtcgtatgcgtagtacatagggaatcccatccattctaccatactctctagcatggaggtgtcaatatggcaaccctggccatctttaccacgttgcagtagcgccgagagaatgttgctgtaggcgtacgttcccgcggaaatatcggcgatagagataccaaccttcaccggctcttttccagtgcccgtgacggatagcattccagcctcactctgaataagaaggtcgtaggctttcttgtcacgatatggaccatcttgcccatatcctgatatatcgcacacgatcaaagcagggtatttctcttttaatgcctcgtgagaaagccccagtcgcgcactagcaccgggagccaaattctgaacgagaacgtcagccttttcgaggagcttcatcaggactgcatggtccttggagcatttgaggtccagagccaaactctccttagagcgattggtccatacaaaatgcgacgctaggccattgactcgcgtgtcataatgtcgtgcaaagtctccaacacctggtcgttcaaccttgatgactcgagctccaagatcggcaagttgtcgcgtgcaaaagggcgcagcaatagcttgctcgaggctaaccactgtaactccagcaagaggcagaggcctagagggcgggttggaataatgacgcgatatgagatgtgattttcttgcatgttgaactacaccggacagggcttgtgatcgagaagtaagtgagaagaatgctttcattgtgggctgggtattagagcctgtcgttgcaatgccagctagttgtcttgtgcatttagaagattgatgcgaggtcgaattcccgaatgcataactccgtactccgtactagtcggcgcggagatacctcggtcagattgccgggagtcggctgtcggctatggtcaggtgagctgtgattggatattgttgcgcggcagtatcttagtcatccaccctcacagtcttggaagatttcaaggtcccttgttgtatgttggttgtatcttttaacttgcctatcatattcaaagcccaaaaaatcagcctttaaattaataaataataatctactgcgtactaatgaaatgaataagagaagttagtactccgtacggagtacatggttcgtgaaggcggtggtaggggcggtaaggtagtatccaatgagagagtcatgaaccagtggcctactcgtcgcccgaatgtcgaacacgaactttgaactccaatgttgtacaactctcaaaggaaaatctcccttttttggccaagctccgattctgataaacgccaagcacatcgaaacccacgcgaggcgcccaatgcaccaatgcacacgggaaaatttgtacttcgtacggagtaccctgtcggtgcaagttaagtgccagggactcccctggacaacctcgtattctcgaaatgtgtctccttttcgcctcatacccatacgataaatgtcataacacaccgatcgcgatcagatgagaaccgatggttggtgttccccccagcaaaggctgcctggcatgtctccaacggcgggttaaagtaggaaacccccagtggtaggctattttctttttgcggtaacactctaattcagtgtccggtgtgatgaaacccagccaagatgtcaatcatgcgagagaagagggaacccatgtcctggctacatcaggaaccggaaattctaccgtttctctgcatcaagcagtcatcaccagctctcaagaaccactttcccccgggcacaatattcaacatcaaatatggcgctggtcactgcagaagaagcgcagcaatgggccacgattccccgtgcgtctatggatgaggctctgatgacaggatcggtttcgaaggcgctagaccggcaatacaggaatggcttttgtgatctcgtggatgctatatttccgaacatttattacagctacagcactcacgtggaactaccttgattcgagatcgctcagaacgcccgtggcgcacgaattgcaatggaataggggtttcgcagccttgggagcttgcagctaggcatagtaaacggcgatcaacgaaatattcttgccagtcgagaaatatatggccgtggactgcgctatcttgttcaagccatcaagaatccagctacagttggcacggatgacaccccggctttcttgccaagaccaaagctctagtcgcctcctcccgaactactaatgcggagagagacgattcaatgagtgcaatcaacaacagccgagagattctgggcgatgtgaaaatccaaataatggctggtgtgagggctgatcacgaagggaataagaaaaagtgtgaggctttctttctttaaactgattccgcgttctaccaagaatgcatcggtgggatccactctcgagggtgttcattcgaccattgcacttctccgatagttgtcgcttgtactagtgtccgatcgcagtcgacaaaaaaaaaagtaacaccgtggttaaaactcagtccgtataagaatgagtggaaggtcatcaaaagcgctaccattgcacgcatttcccccgctcggaattatgacaagacacccaagtggcattcaagtggcattccgaggttgaagcgccgcatctagccctttgtgtgattaactcgcaaattttccagtttatcccgaaagatcgacggactgaaagcgaccgcactgtcttgagaaactgggcagttatggggatgcggtcatgtgcgacgatgcatcccaagatcatgacgggaaatgacattatcgcagcccacatgaggggggagggggctgggtcccattgttacgaagcaatctggagagaaggaacttaatgaatgttcgacgttgggaatgctggggatgtttcaaatccggcgatcaccggatcaagagaggttatgacatcgcagtgaagtaataataatgcattacaagccattatcattctattcaattgctccactagatcgaattctattctctgattattatattgattgcgtagcctttttcccagcctcgtttcatacaaattatgtacactctcaatcgcggtcttagcgcaatcgcggtattcagtgtaagctcaaaaaaagcatcgtgataatgtgaccataacgacgagatcgtcctgaaacattctttcctagcactgccccgtagaaccatgtgagatccagattgcacaaagcacaaggtgtcattgattgttcctggaggaagaatgctggggcggttttgtcacattttcgaaaccggcgatcatccccggggaaggtaagttgtcgtacaatggggaatacttgcatatgtactatatcctccatacatgtgattgatgtacagtctgccctcctcagctcatgtctcgctaatgtatgcttgctcgaaaacgcaacacaacacgggtacctggactctttgcgggtacttggggcatctcaagattccagcccccggtgcttgcgtggcccctgcagtgttcatccattcggattggtcacaacgcatgctaagcattctgctggacgccattagaagcttggctagccattgggagtgcttccggtggaccattaacgtcatacgaatctggattgtagcgagtcgcctacaagtgccgatcagaatcggcccaatcatcgtcttaaccaatcctccacaggtgtcgccacagcttgcgtgatctcgatttttgatgtttcgagaagcaatctattcttagtttaccaacgtctgcaaatgacaagagcgaccgagggatatatatatagaggatcaaattcgccgcctagctggttaccgcattgctagacttaccaactaggttcaccatactactttgatatacgttgtggacaaaatcaattctcacaatcaaaattcatctcatacattccctgtcatgccgtcctcattggcttctagcgagcgctctggctcggtcaagtcgcaccacagccccaagacttctcttcagagcaaggccgatcctaacatggccctacatgaatcagaacctagtgtgtattcccgccaaaatagttcatcttactataggacacccactgacaggaagtagccgccgtgaacctccaacctggatctcgggatacattctcgctccgaagcatccagcataaggaccgggaaggaaagctcatcagtaagtcaccgagtacaattatgttcgattagaactgcattctaacctggtgatagccgatcccgatctctccaacccaacacgcagccgactcgagcgcccgctcgacacaattcgatcgtttgatgcagccatcgatgcacatcgcaaacagcaacgaatataaaggagggatcaggaccaagtaattacaccaggacgaaacgaaggaacgcttcttaatgccaatctcaattcgaacacgaggtgtcgatgtataattaatgtgtataatggagtcacatggagatatcgaaattcgagttaactattctttcatctgtagcggggtgtggaaaatgagcggaaatgtagtctctggccatttattgcgacatgtaaattctggttttaaaaccacaaacccatgaagaccgcccagaaacatctatgacaattgccggtgtaggccttttagtccactaggattatttacaatttccaaagcatgattactactgaggggaatttacaaaatatatattggagggagtgagatccccacaaaatcaacagtcatgtatgttgtataagattctccacacatgcccattcgcaaagggtattgtgcaactctcgaccggagtttgccgttgtgaacttatatagaacgaagtcggtcggctattggaagctggcatacattgcaagcatggccgaaggagcgtagaatcggagaaaagccgacttgatctacatgtcgatcttttctagactacgttggcccgaagtatacagcaattcctaaagatccccatcgtggattgtaactaggttattcttaacttgctatttcccacatgagccctcataaccctgaatctctgcgacagtctaattacgcatatgaaagggaagaatgacatgcataaatacttgtgcatagatgaatcggccatatagagaaatcatctccgaggtgattcaagatcttggacagttttctttggccaataatattattatttcctagggccaagcaattctgtagacagactatagcttcaatctacctagcgccgaattaaattagatcttttgaggatagaaaaaaggagaaagccacccaatgtcggcgctataccaagaagccccaccacgcaccgcgtcagctgaattttttttaccttttttttcatttcaactagtgagggaataactgttaatttaagattacttttgatggctgcctatttcaatggggaaatgcatacgtggtagtgtctttgtttgcagatcgacaaagaactgccaaagccaagtccagttaagtacgtggagcctatccatctctctattattattcgttcggactacatgaaccgattcgctctcgagccctaataatgttctttttgagagactatctccgggaaaactgccatggcgccagtggcctaaacctattgaacgatggcttcaaagcacttgaccatattgggcatgttagcttggctatacgcgtccttttcgtggttttagagagagcaaatagaattggactatctgacactattaatcttactattaatggatttgaagccatggattccccccgtctttgaccttgctctcccatttcaccagtcattattcactcgtttgattccttgattccttgattccttaattctctctctatctttttcaatccaattattccaactacatacattcgctataaacttttgcggcatcagctccgcaagaccattcatcaccatgaaattctccttggtggcactggcaaccctggctggggttgctgttgctgatttggatcccatcatcatcaaggtactgtctttatacatgttacatgtattcaaaccgtggtgtactaaaactgtcaatagggctccaagttcttctattctagcaatgacactcagttgtaagtccgaatgtatcgatgtatctcaaattcggtgactgacaagaacagctttatgcgtggagtcgcctatcaacgtaggtcgtttatgcagtcacctcaacatcccgactaacctgtttgcagaggaaagcacgagtagcagcggctacactgaccctctagccgatgccaccgcgtgtgcgcgtgatgttcccatcatggctgaactccgcaccaatgttatccgtacctatgccatcaacgcctctgctgaccactcggcatgtatgaaactcttgtccgaggctggtatttacgtgatctccgatctgtcagaccccgatctatcgatcgatcgaaacgatccttcgtggacaaccaatctctttgcccgatacactagtgttgttgatgaactggcccagtacaacaacactattggtttctttgctggaaatgaggtttccaacaccattgctacttccgacgccagcgcttttgtcaaggctgctgttcgtgacaccaagaagtatatcaaggagaagggctaccgatctatgggtgttggatatgctaccgccgatgtgtccgacatccgtgcggacatggccgactatttcgactgtggagatgccgaagacagcattgacttctggggatacaacatctactcgtggtgcggtaattcgacctacgcgaaatctaaataccaggctcgtaccgaagagttcgccaactactccgtccctgtcttcttcgccgagtacggttgcaacgaggtcacgccccgcgagttcaccgaggtgaaggccctctatggcgataccatggctgaggtctggtctggtggtattgtgtacatgtacttccaggaggctaacaactacggtaaggaaatgattcctttcccacatatatgttcgggtaactgatcagacttttaggtctggtctctgtcgtcgatagcaccagtgtcaagaccatgtccgacttcaaatactattccagtcagatcgccaacgccaaccccactggtgtcaacaaggcctcctacactcccaccaacaccgccctgcaaagctgccctaccgtcggagccagttgggacgccaaatcctcccctctgccccctgccgccgattcccagctgtgcgagtgcatgtacgatgcctccgcgtgcgttgtcgccggatccctcgcctcgacgaagtacgccaacctcttcagcactgtctgcggctacaccgactgcagcggattgacagccaatgctaccaccggcgagtacggtgcttatagcatgtgttcaaccaagcagcagcttgcctttgccttgaacaagtactatgttgagcaagaccgtgctgcggatgcttgcagcttctccgggtctgcaaccgtcaaggcctctaccaaggccactggcacttgctctacacagataaaagaggctggaaccgctggaaccggaactgttactaccgaaaacactgcaaccgccgactccagctctgcttcctcgacagcctcgtcgtccacgtctagcagcggcgccatcagggtgcaccacagctcatcctttggctctttccaggtggctgcttacattgccactgcactcctggcgggtgttggaatgatcgctctgtaattcagtagatcttgatttttgtattttcttcgcatttggaccgtgtgtctgttatttcttttcgttccgacatctctgatcatgaagctcaaagcaattcatgttcgagctagcgagaagatagcattacttgcaccttttcctgattgattatcattgctcgagaaagaaattgataaccatcctattgaagcgtgcaaatcgttaagatagaatctgatttgtataccatttgttagccatgtctttttagcaatttcggttttagttctagtcttacaagcctcggtctcctgtctttctcgcattcttttcttctaaatcaccaatattttgtgtggccattcattgacgggtcgtcttactagtgcgtacccccgaccttcatttgatgttgtacatcgtgttttgagcccaggatgcagaagcatatcacccaagctctttgatgtcaccaacgtaaaattatcattaccttctcccagtctccccatccaaatgcaacataccgatatgctcactgtttattcttctcggaattaatttatattttgtctgaagtcaccccgggttcgaggctgcttcaaatagagattatttatatcatttgctgaagtatttatttatatcctcgaaaagagtcacccctggattcttgccatgtcatatactgctgaactcggatggaattcaatggcacctcatcctcagacccatcgtcggcatgggacacctccagctgtgttctggttttattacgcggctcattcgccggtcgtagggcagagttatccaactcataacctttagattggtcgagatctgtagttcgtgatctagtcccagaccggctggagaacttggatgaaaatatcatgaacagtgggcgcagggtcggcatgcaagcggagatgatacccgttgaggattcaacgacacaccaggtgcaggatcttccaagtgtccaggcaatgtccgtcgggtcgaatccaaaaatggtagcgaagcgataggcactagtgaaaacaacgctaagggagagcagcccggttagtctatcgtcacaaagtagtaatatgtaggaaatggatatacggacaaactacccaagaggaatattccaatcacggacagtcgatgcgtgaggcttgcgtgcagtccccacaccaccttgaccggtagagacagaatgagaatgtcggtgagaatgttgggtactgcgttcccgatgaacatgcctttaaggttgatacatttaccaggaatgcgcgtgtcccaggctcgcgggatcggattgcattggaagacgctcacgaggataatagcgacaagccaggagagtgtcatcccacccaataccaaggaggcgatgcggatttccctcgtggggaagatgcgacagtacatgaggaggatagaaattttggtggttgctaccgttgtgacgtacatgatctcaaatatcagtagaagctacttggatgttagcggaggtatcaactgtatcctctgtaatttgaatcggacctttgcaatcattataatgtttgctaacggcaagacctgagaatgtaaacccatgccataattagttactatcaacaattagcatgagaatcaacaacctttaggggaaatgtgtcgtacaagatagcatcaatccaacgagtgctaacaaaggaaagagagcgagcacgataaaaaagtcgtccaggcctggctttagtgatttcttccaccgtgcgagaaaccgtaaaatcacaaacaagacgcccaggacagtcatcgtgatcgtcccggcccgataggacccttggtagctatcctgggcattgtatgcagccatcgtgttgggacgttcgaaacaggccaagatcaaggtgcggcaatgcttactttaaagagaattgattcctctcatgcagcccccgaagcggcaaaagagacttgtcagagatgatccacttcaagtgtcaggattcatggttatccactattgagcgacaaacggtatgcctaatgtgtgcacgattaatattgcgaggatcaatccgtattttaatactctctgtgttgcaactagtaagaggactgcggaatactacggaatgccaccgcaacaaaattcgatgtgctttggtgcgtaacattttgagacgaggggatcatgttattcctccagtcgtatgattttcattatttccttcgtataggtttaaggttcagtcggccctgactagatacagggtttagtacattaggctttgggtctgctggtacttgttatcatatgtaacacttggacaccagttcctttcgactttgcgctgttgctgaataaaatacaagttgataggagagaatactgttttacaatgttgtacggagtagcacaggaaaagatatccgctgggaactccgggtattctgcatatccctgatgatctgcatgtcaatatcccacagcaaatcagaagcacgagaacaacgaacagaaaagggtatgctccgtaaataagaacaatggcaggaacaacggccttgttcgatcctgcgaatgtccgcctagcccgttgtggatcgaggcctctgccaagattggaaattccggcgaccacgtggatactggttcgaagaccccaatcggggccctttggtgcaatatccgaccggtctaacggttttgctagtgacgccgggaacctataacaaggtgaatctcagtcgggctccatcgttggcccaagcagtcggaatacttcaaggaaattgattataacaatagatccaaagagccaatcgttccacgtaccgaagaattgtgggcccggtataacctgcccagttcagtataaggagagggtgatcctttcgccggggtttgctgattccccagaccctggttgggcgtagatgtacggagtgttttcccaccccaattacacgatggccatgtttgagaacccgttttcgtcttcgcactaggcgcatgacaggccgctgacacagtcgacgtccttctagatctaaacgcacaagcgcggacttatttcggcccgtctgtgggcgcatcacaattaacgtctctcaaagaaatggtagaagctggctgctagattttggtggtaaacgactcctgtggcgaaatcgtcggcgccggggttgttgggggcctgggtacacgcagcggtgcaaagccggtcttcccggcgtaatcatggctgcatttgtgacgtcccaggggaaaacggtaaaggacatgctgggcggaagcctcctttcctggatggtcatccaggcgcagggggaggggtgtacacagcatcgcccttgctgccgttgtagtgcgtgctgccatggaggttgagtagtcgtaggaatcatcactaatttgtaaaaatacttgtcagtcaaatgcagacaccagacggggtaaccactaaatagagatatgaggtatcacttactggtgggagtaatggtaatagttgaagttcaatcccgcggagccgtatgctctgagtgtcagtgagagtcgatttggagtgttttcggttcttgaagatcaaatgttgtgaatctttaatttattacccgctttgctctatagatatatatatgcctctactcatctggtaaaagggttcacctctaacttgcaagcacacgacttgatatatataacttccctgctgcttttgtagtccgtcaacctatcatgattaggtcaagtcgcatctctcgtttttatatttctacttcatacaagaaatggcactgccaatttaaatccccgtgcatcctcgcctacagaaaaagacttcatttgatttttccaatgatgaatatgcaagctcgctctaaaaacgcaatgtccggaatttattgagtttccatagcccatacttcgcgatagtgaccgttccaattatacacgttccgacaagaattgcaaatgccgaaggactgtcttcaaagaagtttgtcacgttcattccaaacaggcccgccacaaaagttgacacggcaaatcccaacatgcagatctccagttgagcctcgaaaactaggatctgatttcgtcgtacatccaagattgattgaatggtctccgttgtgcgctccaaatcgcctagtaaagcactggcagactccgcaatagcgtccgtgctcttgtaatatgcctcgaggaggtattccacttcttggtgatcatctacctcatgcggttgacctgcctcccgatccgttaagaacatggtcgccatgtcttcatcattttcaagaatttcccgtagcgcggagcggaactggcgggcgcgctgctgaattgccacgagccttttcttatgattctgcaacccgcgcagaacagagtaaacaacatcttctcttgttgaatcctgcaagctctcttcagcttctcgacggataagaatatgctcggcttcaagagtcgcaatcacagaggcaagcgccgcatccactactcgtagctcaaatgggagtttggataaaagaccagagccaggacagggttggagcctgccctgaaggtctgtcataaagacatcctgcaccttcacgtgggagttttcaattgggagaagaaatagaagcactccatttgtgcggaccaggagccgtaaagtaaacatgctgatgaagataacagacggacggaccaacaaatgcgggattccttccgagacaagatccacgttgcgtagatcgcgaccatctaatccccaccgtttagcaatctcatctctagttcctcgaatttcagattgtttgacggagccatcgacatccaagaccatgccgcgtaactccgtcgcatcatttatgcggctttgcgacagagcaagagacaagttgaacacatcctgattgaaggagacttcttttttcatgtcaggctcccggatgacatgatgcgatttattggggagcgtgatgattccccgtttgcggtagccggccatgttctggatcttatgttgtttcatgcggagattgccggaaagatgatggaattggcgtggtgtatttgtacattttgacaatctttctcttggaacaaaggataaaaaagtccttggagcacatcgatgcatgatatatataccgtctttgccggttgccagtgtgaacggaattgtgtccttgggcaattgtcgatgcactaatcgggttatgtgacttggcgactcgcgtggcttatcatgaggttacgtagttacgtagtaggtcatgggcgaaatggatatatggcgagggcaagtatcattgattatcattgatagtgtgatctaagagagcgaatgctatgacctgaggttcccccctagtggaagaacgttcatccggcaattcggatgatctgcctcatggctatgcttgtagctgactacgctggtctttgtactagagaagccactaaaccaaagccgtgattgaagaacgaatacgaagaaatacgccacattttaagctggtggaatgataggggaaaccttccaaaaataggagatatttttggaaaccaaaatacctttcacaactcatgcacgattctgcagcttctgcagcttctgcagcttctgcgtgattctcttggggtcaatacttcttcacaattgtgtcgatatagttgatattcttgtctccaaatgactgcggcggcttctagttgggacacgagtcgttgacaaagccgctgtatgaaacgccctcggatatagtccggcggagccaattgtgaggaggagcgagccatccgtcggtggataaaatgcggaggcatgagaattttaaagaatggatcaaaagatgtaggtacacgaccgagatactgtacggattagctgggactgatctggaatctcggcattggtattgatgtcggcatccaaaagataggttgcgaaggccgtaagcacagcgggtgtattggccacggtatagttgcttatcttgtagtatatatcgatgccagtgttagtgctgaggtcacatttacgattcctgggtggttgaacgatgatctggcgtcctcgggtccacggtcggccaaatgctgagtcacccaccaattcaaccgtccgctaaacacgctgacgatagcagggtagcttgttacaggcaagggaaacttcagtatgactacgtcaatgcttcccttctatcatccattgtgctcttcaagttggcgacaccaatccactctgacacccatcatgggcaatatcatctagccgaaagtcgatcccctccctgtctacggacatgacctgacgggtaagctcatcgtcattaccggtgccagcgctggaatggatctcgaaacgaccaaatagctgctgcgactgtgcgcctcgattatgattctcgccgtccgcaatgttgccaggggtgaggcctacgcaacttttctccgccaggaccgccgcattcaaacataacccgggggcgatcatgaaggtcatagttcttgatatcgatgattttgacagcgaataacggctcacgaagtagctccgcgagaggtttcggtagtctatatcctcgttcttaatgcggctatcggtctacccaagctggaacgcagcgcgagcgaccataaccgaaccactcaagtcaattactacgccaaagtttgtttactgccgggctaatgccgaatctagaagggagtgcagagaagacaggctcttctgtgcgtattgcctgggtcggcaatcgcgcgcacgaggccataagcctggataagaaacctcctaccaagcccgatgaaggtctacttgcgcatatggacagcgaagatgcctgcatcccgttccagcgctacggggacttgaagcaaccttgcgcgacattcatatacagtttagcgccgcggctggaccccaaggaagtcattatcaacatgacgtgcccgggaatggtgaataccaacatgcgcgacgttctccccctacatatgcgcttgattgtgaatcttgtcatgtccttccgcgccaggcctatcctgcatagtgcactggtggcgggccccaagtcacgtggcaagttcttgaacgacaagaccatatctgagttggtaataggctttgtcgttccatgtcaatctcgttttaatgaaagctatcatctgattggaatgttgcagggtgaggaaattgcgttattgatatgctcgtatgcgtgcttatccacgtgagctctcgctcaatggccgtgcctcgtggtgcagcagcacagtctctaaataggagaatgccaattcctactctgtaagctcgcgagagatctggatagctggtggcatcatactttggagttagggatgaagcaggcctatcggagttgctcgtagaactgacatatatttaatggcgaggatcacgcatcgagatcagaaattatggcatgggaagtccatatctaagccgagtcagttcccttcatcattgtactcggtgaagtcgctgtccgggctgcgccgtcaatattaattatgtaatcatgtagatgtccgatgtacaaggcacaaacggtagaccacgtgactagacgtgagtctcgaatctacgttgtgatgtcattttgcctttacccgtactccgtacggagtacagagacggcgattatgctttgattgggtcaattaatatctgaagatctcaagcagaacaagcaatgaatcacattgggcaaagcttggcttggtttatcgatcagcatctctcggacataatccctcaattaccggaaagagtatctccgagacccggatattctgtatcgagtaagcagctcaagacttacatttacgtcaaataagccttcgtgtcaccgtttcaaaggccgtctgtcgattgacaactgttacagagacgcataacacatacgttcggagacattgtggtatacccagataatctggaaaggcacatctccgacaaggcagcaacgtctcacccatgtctagcgccgtcgcaaggacttcctgcgacgaacaaaggaaaatcaatccgaaatcacagtcccttggcaaccctgaaaatggaaaatcatcaagacaacctctctccagatcatgacgaggttgaaaattctcgcgctccacagcgccgccgccgaccgcccctgtcttgcacggtctgccgcaagcgcaaattaaaatgtgaccgctctctgccctgcgggcaatgcgtgcgctcgaagacaacagcccaatgcgtctttatcggagctcagccagatccgacatctgatcagcgacgcatgtcgcccccgcaattaccacacggtggcgtagaagaccaggccggccggaaaagcggaatgttcgtctttgactcgaagttggggccgaattcgacttcaaatcgcgtttcaaagcgtgctcgttccgatgagctacatgagctccggagtcgtctgcgtgttttagaaaattcgctcggcaagtcgtctcatcttcagacgcctgagacctcggtttgtgatatattttctgaagtagatacggccaatagttctgagaatgttggtgttgatgaccgcgtacgattcttgccagattcgagtttccgcgggaagaagaccaagactcggtatttcggtcgcagtcattataccaccactgtttcctttgtgagtatcctttattgcgttgtttggttgatttgctaattagatgtagttcaaagatattggtacctttatgcgccgtggtcgttgccgcggaggagcaaaggataaagagtacactgatatgaaacagttcaagaccgagctttggtcgcgtgagatacaagaacatcagcgcgactttcgcgagcagcctttcatgcttaatgaactggttccccggcgaaacgttgcagaccgtctgcttcagctttatctcgacacttttgagaccacgtatcgaatcttgcacataccaaccttcttgagacagtacgctgattactgggccaacacccagccaaccgacatggccttcgtcgctcaattactcgctgtgatggctgcaggcagttgcttctatgtcccatctccaggtcaagaggaccgagacatattccaaaaaccggccatgaagtggatcatggctgttcagtcatatatctcgtgcacatttctgagcccagaaatcgacttccgaatgctccagacacagactcttcttttagtagctcgcctgggagtcgccagtgatgcggatgtagcctgggcctcagccgggtcgttgattcggtctgcgacgataatgggtctgcatcgcgatccggctcgtttccacaaggccaggccattctactctgaactgcgccgtcgtctttggacaactatcgtcgagctggatctcaagttctccctcgaccgcggggctccaccctcggttgatctagacgaatgcgactgcgatccaccgtccaattgggacgatgcggacttgataccagacatggaggataatccagctccgctcagtactgccctttatacccaaagcttctaccaaaccctcctcgctaagaccctcccactacgataccgaatcgcgaagaaaattaatagcctccgatttaatctatcatacgacgatgccctgcgaatgggtgatgaactctcccgctccatgcaacatgcatcctcccttttcgaagataattccccgagtattgctctgggagaatcaggacgtcaccgattcgcccaatccctacatctcttcatcgtgcgcaaattccttctcgccctccatcgccccttctcgcttagtgtcgtacgcctacccaaatgctcctattcccgcaaaatctgcctcgaagaatccctcggcattctctctcagatggaactcccccttgcgacagagaacatcatttacccgaacattactcaactgggaagcggtatgttccgtgatgaaaccttccacgccgcaatcaccgcctgtgtggagctgtcccttcaagccaatgaaatgagtatgtctactacatccgggatggatggtgtcaactccagcgtgctcatgagcatgatccagtcccaacagggcgtgatgctccaggctgtcgagcgcaccgctgataatttcgggagacgcattggccccggtgggacggggtgcaagcctttcttctttttgaatatcatccttgcttcggtcaaatcgcgcgtcaagggggaggatcctttgtgtaatgttgatacggcctcgaagaggtccgttcgcatctgcagggcgatcttgaatggtcttacctacgaggaagctaagattagtgttgataattgccccgctcaggttggtatctccacttatagctgtctgtctgccacacctaaccttcctgttcagacttctattccttcggggacgaatcctgccccagctacaccacgtgatattgaccctacgtcgcttctatcgaacgactttggtgacttcacggtaagttggcgctccttggatgctgtttggggctctgctgacctttttcagccaacggatctaggaggctggtttgatggattagattacactggcccagagttgtgggattgggatgccgacttgtctggaaaccttccaacattctcatgacttatggagctactccctaatattaatgactgatgcccggtgatattgcttctgttcaatgtcattctcaaactctactctcatctagtcaaagaatgactttcgtcacagtaaattgttagaataataaatatgcatatccttttggcttccaggaaagagataaaaattgcaggaagaagattaacaatcccacttcctcaagacaccacaccccggaagatatagagaagtatcaacagaaatgagatgctcaatattctcttaagtgaactctgtccgatataacaaaggtgaagataacattagtaaaaggaatggaagccttttcctcaaatacaaatctcattctgacgagctctcttaaaagacttaattagaaatacaagaaaacatctaaacatctaactaaaacatctaaaacatctagaacctaactctatagaacgacaagccaatcaaaccctcaaagcctcacaacttctctatctctttccccatttcttgaccgcgaacaagcccgatcaacacaattcttcttcgaaatcgcaacataactctgaaccaatctatccaataacaaagattagcagaaatcccagatcaagtccagaagaagaaaactcacgcctgataccgctgaatgttctggatctccaaacccgctagagcccccaatgaatcctgcacatcctgcaccaaactcacacaccgtcccatactgaaatccgtcctgacaacaaccctcatcatccccattgtctcgcaatccgcagccatggtataagcaggcacaatccaccccttctcgcgcagtttacgcgcaagcgcccattcatccaagaagacgttttgcgccgaactcaacctgaacgccacgaccggtaggccatggccaccaccttcactcatgattatgaaccccatttcttgcagctggctggtgaggtagtcggctgttgccgtgagatttctcatgatgcttgtgtacccacttcggcccagtcggatgagttggtagtactgtgcgatgatatgggatgctggtttggagaagttcattgtgaagttcacttgctcggcacctaggtagtcgatgttgaaaactagctccgcgggaaggtactctggtgatcgccagagggcccagccgataccggggtagacctgtggaaattagcatattgagtttattagagttggacgatcaagggatacttaccagtccgtacttatgcccagagacattgatcgagacgacgttgggtaatttgaaatcccatactagatccgggttcacaaacggggccacgaatccaccgctggcggcatccacgtggatgggtgtgtccagtcctctctcaaggagaagttcactgatagctcgtacatcttcgtactgccccgtgtatgtcgtgccgagaatcgcgcagatcccaatggtgttctcatcgaccatgtcgacggcttgaactgggtcaatcacgtatctcgtctcagtacatgggactagcttctcggtgatatcgaagtatctggttgccttttcccagcatacttgtacgccgctactcatgatgatgtttgggttggaggcatctttcccctgggtttggcggttgatttgccagcgcttcttcatcgctagaattgcaagcatgatggcttcggaagatccaatacatgatgtgccaaaggcggttggagttccgtcagaaaccggggaatggaataggtcggcgaggatgttcagacagcggtgttcgatatcgacagatttggggtattcttcgtgatcgatgatattcttgttcgaggattcggcgagtagtttgagagcttcgtcttcctgttacagtgttagtatgcgtcaaaaatatgacgagaagctgaaataccatgtatgtggtcacaaaactggcgaggctatattgagcaataacgttagttgagttttcaaaattttgacaaatagactcacttcaagattggctgaccatccagggccaagtcatctttgatcagctggtaggccacatctttcggcatcccttcatctggaagccgatgcgatggcataggtttggcaacgaaccgggagccatagacgtaagagcagtcgctcgtctggtcagaaagctgcttggataattcctcgatagaacccattatgtaatgaaaaatgtagattcaaattggaatactgataaactagcaagacgttcttgactttatattatttctcgcaagtcaattgttgcgtactggaaaaatatctcatagcgaaatcgtgtgatagggttatgaggcatttacacgagatatcatgatcaaagctatagtcaaaaggaggtttgagcgccgtttcaagttgggttttgcgttcgtgtctgtagtttgaggtatatatacatgacaacgtgatgatcgaagcttatctatatctgagtattccatgtaagacaagccaagaccttctagaaaacatcagaatagactattaatacaacagtttaactaactccttgttacaaagtagaattgggagtgatccctgccatcccttgttctaaaattggaaacattctaaccctacggagtagattacggacagagctaatactggacaatgcaaataccaaacatgcgatttactccctttgccacatttataaatgaggcttagaagcatctttggcttcatggttaattagcccctgactcgcaagggaacgttcaaccttcccacctccgcgggtgcggcgggccgaaaataggggtggcgcagccacaatatgtagtgtttctcacatgcattatctcgtattattattacaggcagcaggatattgatttgtggagatgagacgataaggtcgtcaagctgatagtcctggagtggtatagttattctactgttttgactttacattcatatctattgtaggagtcgcgagcatatatcgtgttatccctatttgtcctaacattttgaaagtggaacttccaatatttattcgacgcagtttgacatgctaagcaattgctccctatatgtacggagtatatgacacgtaaacagagcacccccttgctccggggttcatgcaagtcgtggatgaggtcaacaagattaggctcagacacgaagaagggagcattcttcaataatggaatcgtcgtgtcggcattcgtgtgatttacaaaagcccgtatcgccattctgtatcctgttcataacatcagtttttcgcttgcgggaacaggatgctgcatccaattctggatgttagtagtgttaatgttatcctctcattatcgggtaagacttgaactggcatgtctaggatgttctctaattgatagttttaggaatatacgtcttggtcttcgggtttatcgctgtgaaaatcaagcaaagatggtatctcggtgaagcttgtatggtgtccctcaatctcactagatatcggtcgctgatattattcagtaccctctttcataatcggagctgtcctaggaccattcggtgcgaagttggtcaatgtcggccagtggggaggatacactgacagcggtagtggtgatattgcctatgtaggtcctctcgccacgaaagaaaacactaagctaattatactagggattgacccgagtcgtgattggcatcgctatggtcaaagtcggctatgagctaccaaaacgatacattcggcttcatctggtcgaactaaccatttgcctattgccattgatgacgatccagtggctgatgacgtcggcatgtatcaaattaatgatccctaatctatcgtttgtgtgttcatcttatcatatttgacatgagaacacactcccactaaccttgatgcagttgacttccctcatcatcggatcatgtgtcatatgtatcgaccccgttctctcacaggctatcgccaagggtcctttcgcagatcaatatgtccgacgacatcttcgtgaatttatttcagccgaggcaggtggaaatgatggactcggtttcccatttttgcttctctcaattgcccttcttcgttatgctgatgctccgggtatggagacagtaaaagttggtcctaggaaacagagtcgagattggattagtgagccgagtacgggtcggtttggtggagatgtcggccgagctttggcccattgggctgttgagggagtgctatatatgcttgtcatgggcgctgggtatggtgtgctggtcgggttcctgagccggaaagccttgaacttggcctcgaaaaggtatgcacatatatactatcagtttaacaaactagctattgacatgagcaggcgttggattgacaaggagagcttcttctcatatcctgttgcgatgggtgtaagttattcttgagaaagatttggagtttatgctaagaaggcttgcagttgtttatcgtcggtacctgcggctgctttggctccgacgaaactcttgcctgctttgttgccggctgtgcattgaactgggatgggtcttaccacttcgaagtcgaagagagacatgactctttcaactcaacaatcgaaaacattttgaacgttgggaccttcatcttcctcggcgctatcatgccatgggatcaacttcacatgtccagtcagaatggaatcactatcgctcgactattcgggctcggatttttgattctgttattccgtcggatcccagcgatcatgatgggatatcgattcatgcccaaagtctgcgataattggaaagaggccctgttcatggggtattttggcccaattggtatgctatccaaccaagatgttgagtttttatgttgaagtgcagtgcttaccggttttaggagttggcgctatctcctatgtcgagtatgcgcgacgattgttaccggaccctggagagagtgatacagagatcaacaacttgactgcagccatgataccgggtatgatatacttctacttcaagataatgtaaactgacctttgatttagtggtatattggcttgttttcttctctatcgtcattcacgggctctctatccccatcctgagctgcctttataagtggttcaaaatccctactatccgagactacccggtagaaatcattcttctgtccgaaaatgagcctgttcctaacaatagcgtggtgaatcgccgtaaccactctgttatattaaacaaccggttttcatgtaactcaaaccagcacccctattctgatcatggtgaggatcatggcgagggaacagacacgatggtattgcgtcgtcgcagtggggaagctagctacaggggctcgctagaaaggacattgacgaaaggttcgtcgagcgaactggagcagactgtatctgctagaaatgtagtctgagtggccgagaccggggattgtatattaagtgaatatcctttgacatccttatttggattttagcatgagatagacgcatttcctaccttgaaatgattgaatgatattgtcagcaggaactaattccaaggttaatcgaattgcattaactagattatctatttctcgctgggatgaatatgtcatggtattttaccctactccgtatatatatcccaacctaataaaaatgccaacgaacatgggacaaggccatgtgtgccatatttatgcgcctcttttataataaattgcctcctccatccctccttcccttccacatcaataatattgcctctttcacagcgaccgcaatcatcatctacatgttcctatcttcttacagcgggtcagggaagagtttctcatcacctaaactttaatttcgattcgaaactccgcagactttgaagaaaacaggtccttgtccgattcattacgaattgaacttaaggggtcgcttgatttccagggtggaccccttacaagcctgtaagaagatcgggaggcgatgatttcatgcctcggcccctcgaaactgacacggacataaaaaaggtcgaagggcaatagctcaaggatttcgattctacaaatctctgataatcaaaaatgtcgtgagtgcccatatacttccatgagggggaaacactccccagactaaccctcatagtgcctttgtaacaactctcgggctccgcgccgcccctggccaggcacctgcgaaccacgcatcagccttgctaatggcgaactggtttttcgcgtatattctgacgagcccccgcggcgcaaagatacgcctgggtcttgatcacaatgtcagcccgcgcgaggacttgactacgtacggtgaggcggccgtgcagtcgggaaagattacccgtcgcgcccttgacaagctcaagcgacagacgtcggcgcatgccaatgtgcaggagggatacactttgttcgttgcggcgagtatgtggaactcctttggcctttcctttttcgcacgatgaacttgcatcttgtaaaattgctgcactgtactgaccttgccctctagtgctcgtctccttatacgccggtctccccaatgaaactatcaataccgtcggtgcttggtattcggtttcccgggtcgcgtaccacctattctactgcaacattgaatcttactctttgagctttctgcgatcggcggcttggtggtccgggaacatcagctgtctttatgcgctggtgcaggccagcaagaagttgtagaatagacggaggcgctctttgatttctctgtaatccgataatacataagaacaatacaatgcaagtacatctattatccgagtacgaattgtcaaaacggacaacttactccacctaagactgggtgttgaggtcttggaagtcctccatgcctcgaaaaaccacaacacgattctcatgagaaccttgcatgacaaaaggttccgctgattggtggaagaacccaaccctccagtctccatccccagacgggggaatgaatcccggccacaacgatgaattgcacagtttcgaacaacaatgtccaagttcgcgtagtctcgtccgacactctctccgcatccccgcttgtgaatatccttggcgacccgaggagaaatgactccatttactattagcgacacccgcggacttgttctattgccgcattccataggccctgccgatccagcacgcggtggaattgttttgacaggcggagaaatctctttcctctgcccgtgccattctccggatattgctaatctggggaaaggcacaagctccattttgctatggccaatactccggggtattcttataaattagcaggacttccagcatgactctcctaccccggatcaaccgacagcagtatcaattgatttcattgaccttgtgataatgaagttcatcgctatcggtgcggtcctgttcagcgcagttggtgcttttgcgacagaacgtattattaaaggcgcccagatcatcccggccaacgacaaattggggctgaagaagatcggtgcttacggacatcacaagcacgacgaccgtcggacagtgacaattcgatcatcgaagagtgacaccgacgacatttcatatgatttcctttggggtatcaaggctgccaatcatggcggtagacttctcttgcaaaaggggaagacgtatgtcattggcaaaaagcttgacctcagcttcttgaataatatcgaggtgcagctagagggcgaagtgaaggtacataaccctagtactgtgattgattgagccgctctgacatgaatagttcaccgatgatatcgactattggcaggcaaaccatttctactactcctttcaaaagtctatcactttctgggtctggggtggtcaggatatcaagatcttcggaaagggtattctcaatggcaatggtcaggagtggtacaatgccttttctggcctagaagttttggtgagcatgaaaagagtcgggaatgacttgtgctaatagataattcaggacccggacaataccttttaccgtcccattctctttgtgactgacaacgctacccgtgtgtccgttgagggtatcacccaactcaactctccctgttggaccaacttcttcgtccgcaccaaggacgtctctttcgacgatgtctttataaacgcgttttccactaacgcatctgtgggttgtgaatctggttatattatcaatcaattctaatccttccgcaggctttgcccaagaataccgacgggtttgactccttcaacgtggatggtctcagtgtgaccaacacccgcgtcgatatcggcgatgactgcttctcccctaagcctaacacaaccaacattttcgtgcagaacctgtggtgcaacaatacccacggcgttagcatgggaagtattggacagtactcgggagtcgaggacatcatcgagaatgcctgggttgagaatgttactctgttgaacggccaggtaagacctccgtatatcgattttatcggcgagcctaataggaatttaagaacggcgtccgtctcaaggcttgggctggaccggacatcggctttggtcgcattaacaacatcacgtacaaggacattcacatcgaaaacaccgacgcccctattgtgttggatcagtgctacttcgacgtcaacgccaccacgtgtgccgagtacccatcatcagtcaatttcaccaacattaccttcgagaatatctatggcacttcgtcgggcaagaatggcaaggttatcggtgacttgacttgttcgcctaatgctgtgtgctcggggattcatctctctgatatcgatatcgtcagcccggctgggggtcccccggtcgtgacctgcgatggaattgatggagatattggcgtggaatgccagtcgagctcggcttagattgtgagtatgataatagtttgagagaagaatgatttgaaaatagtcaccaattgaaagttccgactggcacaaaattgaatagcagtctgtggtggcggggatgttgaatattgcttaacttgctcggaagagtagtccgaggagccgtagaggtgtatgtccgagaagagtagtcatctccgagataacatccatccaataacactcccacatcattaccagcaagttttctacggcagattgctcgtaactagtcgcttattctacactcgttctacatctattctgcacatagccacacgaagctttgaccactttttcgtctcaacatgaacggtcaaacagataggcagcaaatttggagagttgagactcctcgtgatctttcttccccagagaaaatagaggttgatatccgggcccgacatttctcaaaagccaaagcagaagagactcaaaaccaagccgtcaccctcaatgacaactcgtcatgatgagtaggaccgccctcatactgggctattctctctccacaccccacaccatcccacaatccgagtggtacaccggctgagactatatccaccccctgtctttagccaggatgtatcgtgccttgttgggaatggcctatgattcggtattctaggctcctacatgcaaacgcgtacagtacttgcaaatcactccaatccggggagatgcatccacactatcctcctttgccccacccccagattcccataaaggtggagtatggggaaaggatgggatacatagcagatgttacggggtatctgctataagaacgtgggcgtatagatactctgcttttttcccccttctcttcgtccgtgctattatattcccacagaccctggccttcatattcaacggagaaaatggataggaggcatcattatattaagggtgcaaatacccgtgaaggagatgagtctggaaagccatgtgcattctacgtcgaagacccagtcgctcatctatccgaggaacatcgccaatatcttctttcgaagcatggaacactcgatttggaacctatccctgacatgaccgataccgatccatacaattggccgcgatggagggtgagaggccataactcctgccatccattcacattttgaccatgtttctaacatttttccttgatagaaaaatttcaacttgaccctagtcgccttccacgctatgatggccacattcactgcctcgtcgatccaatctgcattcgaaaatatctccgaggacctcgacgtcagtatgcagcgaaccagctatcttgtctctctcttcatcgccgtgctaggcggcgcgcctctcttctggcgcccgctgtgtaatcgatatggtcgtcgccccatatttctgatttctttgatctgcagcttgattgggaatattggctgtgcgaagagtacttcctatgcaaccatgggtctctcccgtgctattactgccttcttcatcagccctgcagctgctatcggtagcgcagttgtcgcggagactttcttccggaaagatcgtgctcgctgcatgggtgggtggacgctaatggtgactctgggtgtgccttctgctccatttatctttggtttcgttgcttcgcgtgtgggttaccgttggatttactatatccttgcaattgtgagattccttaaccccaacctctaggatgtactcgtctaactattcattcactccgaacaggtcaacgcaacccaattcctcctctacttcttcttcggatcggaatcactttacgtccgcgggaatatccctaccaacaccgtcatcgccgccaagcagagtcttttcaaattccgccggatcgaccctacaccgttagaattctgggacttcttccaacctctaagctatgtgatgaaaccatgcgtggtcatcccagccgttgcctatgcaatgatcttcctttggggcagtgtcatgcttacaattgagatctcccagatctaccctgccaagttcggcctgaacacccagcaggtcggtctgcaattcctcggtattatcattgggtctgtgattggtgaacagataggcgggttcatttccgatcgctggatgctgatgcgtcagaagcggaccggagaaccatccccgccggaataccgtctttggttgagttatattggccatgctttgacgatctgtggtattgtcgttttcgctatcgaaatccgggactctggcggtgtatggaatatcgcccccgttattggcgctgctattgccgctggtggtaatcaaatcgttactaccgtggacattacttatgcggttgactgttaccgtgaggatgctgctagtgtgggtgtttttattactttggttcggcagacttggggtttcattggtcctttttggttccctgagatgtttgaggttgttggttgggctggtggcgctggtatcgccgttgctcttgtggttggtgtgagtgttattccgactgtcttggttcagtggagaggagcttcgtggcgttgattgatatggccgaggaaatataatttctctttttgtcaactaaatgagagaatgcagatgttttacgcagtagaagacggtgctatccacattttgatttacacaatagtattgggatttggatcatggagttctctgtattcgtggcacaacaggatatggaattgatactggtgtgtaatacgattccggtataatccttctactgaactcgaacccactgcatattaataccgccgagaaaaagtcccctttacccgtgagtagcttagcaatgactgccaattttctatctaatatttctcacttctgttcggcgctgcgtcgggaattgtgtataagttcattagcaattgccatattattatgtcgtagacggcttttagcacgatgcttactcccagactcccagtgcgctgaactgaatacttggaaagtgtgcgttggaggaaagatgccttggcaagggtgaatgcactcattgccgatatactgtcgccaattaccacgttcattcgaactgggttaagagagaaaagcctcggattcattcaatgctcatctttctatcggatatgccccgcagggatcagtcccggtttgcgtggccaatgccaaacctcggctcaatgaactgccattatttggatacacgctagtgtttcataattgccatagagaggggtgctcctgagggaactttggtccattccagtatctggtgacggaggcttcggccagtactagttagggctggggtcaggtgataatctacaacgcggggatgccaagagacatgtgaaaatacaatggtcaaacgaaatgaatgctgtgaaatgaagatgacataagtgtcgatctatcgtcgatccctgtggggaagtctatcgcagtggatttcctttagtgcggaaggtcgaaaatgtgaagcctcggttagaatgggatatcctaaatgtgctaaacgctgttgatgaactatataatccgggaatcacccctttaccctccgacataaaatatcccctcacatcatccaattcctcccaaacagcaacaatgtctacccttaacctcatcgccgattactcccaaatggttctatctcaccttccaggacccacccgacatctcttccgcaacccaacagcccaaaaggccgtcggaattctcgccgccctcaccttcctccgcgccacaaacgacttcttttcaagacgcaccctacaaaactggacttccaaccaaccatggatcccggcacgcgagctcatcctactaacgggtggctgcagcggaatcggcaagcaggtcatggaagacctcgcgcgcacaggcgtgcgcgtcatcatcctcgatattaatgagccaactttcacactgccggctaacgtcaccttctacaaggcgaatgtcagttcctcggcggatatcgcgaatgtcgcgagcacgatccgtgacaatcacggcgagcccacggtcttgattaataacgctggcgttggacacgagggggcaatcctcgatgaatccgaggagaatatccggcagactttcgaggtcaataccctctcccatttccttatggttaaggagttcttgccggctatggtgaaggcgaatcatggtcatgttgtcactattgctagtatggcgagcttcgtggctctcggtgagatggtggattattgttgcaccaaggccagtgcgcttgctttccatgagggactgcggcaggaattgaagtattggtataatgcgcccagtgtgcgcactaggtgagttattctcgggtatgtatctgtagattttgctaattattgctttagtattattcaccctgcgtgggtacgtacgcctatgatcaagatgctcacagacaacgaggcgcacttcaaagagtctatcatgaccacccaggtcgtgtctgacgctatctgtaagcaaatcttgactcagactagtggccaggttcttctgcctgccagtaagtcggtggctactttggtgcgcgctatgccaacctggatgcaggagggtgtgcgcaatttcgcgtcgggttccttgaagaagatgtgtgttctgcagacagaggagaaggcccaggcgcagtagatattcagctttggaaatgactggagatgtgattatgtcaccattttgaattttatgtaactaactaggagatggataactatacgctatctcatcgagcgataatacattgatatataatattgaagttatttcaaaacgccgacggctcctatcttgatatttatgggctacagaagtcaccatcgagacacggaatatgtgtgtaaaacactctcactattccatgtgtacccaattcatgtatgtacagacagcgttccttcatacaatcacaccattaactcggccaaaaccgcctcaaccttcttcccctgctccgtctttgtaacatcgcccagctctaagtgataaatcggcgcaacatgacactcacgatacccaacaaacaattcaacattctcaaagccctccttgaactttgccgcgaagtcttgaatcagaggcaacatgatctcattcccgcctgcggtaatcaataccgagttcaccgggaacgccgtaaaccaatctgccggcgcagtcgataaatccgtgtaatagtcacgcttgccagcaccaatataggctgtcacccacggtcccgcaaccgccatcgtaatgatatcgccatcgctatagacctccatttccgggaattccttctcgagaagggtccacggtgcaatcatcactgcgccgccgaggtttccgcgaaaaggcaggggatcgatctctgcgtgtgggtgggccagatgagagagaactccaccaaccaggttgccgcctgcggagtcgccgcccaggaaaatcgtggacgggtcgcggtttggttgcgaaagaatgtatcgtaggcaattcacggcctgtcggagttgagtcgggtagactgcgattggcgccagcgtataggtcagactgaagacagcgacgcttttgcctaatgcttcaaggtcgtgaatgagctgcgcgtagaatttgaaataacccatgttggcggggagtccgaagccacctcctgaatgatggttagtggtggtcaattgaataggggtctttctttgctggctgtacacataccgtggatccagactaccacattgtcagcattcgaatcacccatccagtggcctaatgctccgtcgcccaagtctacggactcgggtagcccaccggtctccttggagtgttgctcatagatcttgtgggatggcggtaggatgtactgcatctgagtggcggtcagccgcgagctcgccttgcggaacagtgcatatcccaaatgcagggacaaagatttggcttggcgttcggtgcgtcgaaggcccgtcaagagagcatagacataggcaaccacgatggaagccacggctgggaggaagtccagtttctcttttatggagaggttgactttggttactttagtgacagacatgattggaatctcccgctcatgacttgaggccctaagtatattttagcccgtacaagtgtgaaagtgaagtgttgatcctctcgcaagcctaccccgtttaggaaggtgccgaggtttggaaaattcctcggtctccatatccttgagattagctgtatctcctacggagtagtatttttgcatctttagatctctagttctctatacccaggggtatcggggcatagatctacatatcgatatctgtgtagatctcacattcacatctcggagaacgatctgtgtaacttccaaggtcacttgtatatactaacttcaagaatcatcacgtcttacacgagataaacacgtacagagtaccactacgaatcccatgcaactccccgatctccccgtgtacattttaaggttttgcgtgttgtttaccccaaagtcgacggtgtcgatctgccgaataaaggattgtgaaaccgaggcatgtcaacttttttcttaaataacctcaatgctattcgcttttcagtaactgttcatttgatcccattcatccatcatgagtggactcgatgaaacaaacgaagctaggcacttcgatgtcatcatcgtcggcgcgggtatctccggcgtcaatgccgcctaccgcgtccaagaccaactccccggctacagctacaccatcctagaagctcgcgccgatctaggtggcacctgggatctctttaattatcctggtatccgttccgactccgaccttttcaccttcggcttccaattcaatccctggaccctcgataaccccatcgcagagggttctgccatcaagcagtacgtgcgcgataccgcgaccaaatttggcatcgacaaacacatcctctacaaccatcgtgtgtcatcggcagactggtcctccgataaaaacatctggtcgctcgccgtcgaccacaatgactccgaacacacatacaccgcccgctatgtcatctttggcacgggttactacaactacaaggatcccctgaaagctgacattcccggcctggacgccttccagggccaggtcatccacccacagttctggcccgaagacttgcagtataaggacaagacgatcgttatcatcggctcgggcgcgaccgccatcaccctcctccccaatctcgccgacgatgccgcccgtgtcacaatgctccagcgcagccctacctacatcctctccgtcccaaaccgctccagcaaccgatggctctcctacatcctctccaatgccctgtatctcaggttgcaacgcatgatctcgatctatacaacccgctatttcttcctcttctgccagcgcttcccgaatttctcccgctggttgctcaagttgaatgtgcgcaagcaactgcccagccatatcccctatgacccgcatttcaagcccaaatacaacccctgggaccaacgattgtgtgtttgtcccgatggggatctgttccgcagtctccggcagggcaaggcggatgtcaagaccgatactattcgagaggttacgaagaatggtattatcttgaattcgggtgagcagcttgaggcagatattattattactgctactggcttgcgattgcagattgtaggtggcgcggcgctgtctgtggacgggaagaagatcgacgtgggtggtaaatatctgtggaatggagtcatgctccaggatatgcctaatgccgctttcgttattgggtataccaatgcctcatggacactcggtgcggatgctacggcgcatttggtttgtcgcctgctcaaggagcttgagtcgcgaaagttggtcgctgctgttcctcggctgaaggagaaggatgcagctacgatccaggatcgtcctctcttgaacatcaaggcgacttatgtgtcgcttgctgatcgcattttacccagggctgcggaccgtggtccgtggcgcccgcgtgataactacttgagcgacttgaagttcgctcagagtggtgatattgagaccgggatggagttcgtgcaaggaccgaatctgcggttacgtccgaagatgtcgtgattgatgcatgtttatgatatgatacctacccatgcattatgattgaggttctttgattcagtgtaaatatggtgtttgatgaggctcagtaacaatatgttcattcctattcttcagctgcgcaatctcccttggtgtccgttggactatgcatgctgcactttcgcacagcgtcacccttatcaactaatgcctatgatgttgcatctatcggattcgcacatacactcatattcccaaaataccacccatgattaggattgggccacctcaaatctcgatccgaaccagcattccccaccttgctattgatcccttcaatatactccaccccgtcagtagtgacctgcaccccagtcttctgggtgatccagtattcgggcgaaggctggctccaatcaaagaatggcagattgagcggcactttcggtatggggtctgtagtatgtgtggctcggtatatgctgtttggcgcttgttggttgctgataaactcggccagcttcaaatttcctggtttagggcctccgaatgtccactggtggtttgtatgcgttagctggaatctacactgcttgcttgttttccaacttgacttacaatatccagactgaacccttttgttcgaagaacagtccccgctaacgccgcaatacctccacctagactgtgtcctacgacactcagcctatagctcggatacgcgttcattgcattgtgaagctgggatgttgcctgagccgctacggcgctccagtaagcccagaacccatgatgggctttgcatccggtgcacacgtcgctaaccgaggtgagagcgatatcgagatctgtgttgccatcgcttttggataccgttccgcggaatgttaggacgatcagtttccgcgtgtggtctagggcgatgtagcctgtcgggccgtgatcactgtggaatgtgtcgattacggttgtgttgtcggctgctacgagtggacagttgccatagtcgcaggtcaaactttggcctgtgtgattgatgttctggtcgcaggccgatagggtggcgaactgtgagaatagggtgaatctttctaatagctccgttgagattgctggtacatttgatcgtcagattggaatttggaaaatttgctttgtccatgtgaggcttaccccggcgagctagttgaacaggagatgcaatggatgtcacgctcaatgatagcagtgcaagaatcattgacccaaccatattggatgatacttcgcaagtacagccaatctatcaaaggcgcctgttcttttgatctctgggaaatgagcttatatttataggtttcttttcccaccgtcaacaacagcccacctatggaatgttgcctaatagagaaggagtaatggccgcaggattcaatcccacgatgcaccgtgatgactgtataacagctgagttattggcggcactaaccttgcacccggaggatgattcgattctagagctgagagaacaaatgattatatgccattgaaacgatcaaaattctataatatgatacatacattccactcgtacatatcctataaaccaaaacattcaaaatatgtcacacagtgggaacaactcacagcgtcctcaatatgcataccagatgagattttctcctttccttcttagcctgctcccctcttgtccattttaggcaaatacatgaatttgtgattggtatgttcttcagctggcatgttgcatatttgccatcaatagcacaactaccacatgtgggctcaaagtgggtaatttctcgaggctagatccttggcgaggtagggatcattcttcaataggtgaagatttacatgcaggactcctatatcgagaatcatgtgaagattactctgtagatgtctcacagtgatgcggcccgcagatcgtacgctaatgcatctacaaccgatagatcgtcggctccaccttgcatctcaatactactgtagtattcaggtggattcgcgcatgatatgagtttgatccaccccgacctccagcatggtaaagacgaaccctcctagtacagatcgcctagggcatgtaagagaaggaattgtgactggacactgcaacgtcaagaaagggaagaggccttggatgctgggcatcttttcgttcatgtatgttgcatcatagccatattgctccgtataatgtttccgtataatcttccagcaagaaatagaatttgactttcggaaaagatttaaggttaaaccacagcggggttgatttcatcaattcaaccagggaacagtacaacctaacattccgggatgatgtaactcgatgacaccatttgatatgtcatgatttgaggagtagctaactataaggcgttgacttagccagtcgctttctcgttttactttcactacaccacactacaccaccaatttaaatccctcagctgtctcgatgccccccaaagagaaatataccgatcccgaactcagggatgaaatcaaaaaagaagtccacaatagcgacaaaggtgggaaaccaggacaatggtctgcacgaaaggtatccaacacgattacactcccattacgtatagtctctaacacacatgcaggcacaaatgatggcatcggaatataaaaagcgcggtggcggttacaataccacaaaggaagaaggccagacggagtctcagaaacacctcgataattggacaaaagaggagtggcagacgaaggagggatcaggtacggcgcgacaggatgatgattcgcgtaaacggtacctgcctaagaaggcgtgggagaatctgagcgaaaaggaaaaggacgagacagacgagaagaaggttgaggagtcacagggtgggaagcagtttgttagcaacaccgcgaaggcaaaggaggcgagacggagggccagttctgatgttgaggatgagagttagagggagattcgaagaaaaccgacgacgagaaaggtggggcgagaaccaaacacaatgcgaagcaggatgcaacaccaaaacagaaacaggatgcaaagtctacagaagataaagcaattcctcaactaagctcggttggctcctctaaatgcgcatttggtcgatgctattgacgaaacaggagcgagaaatccaaagggtaaatagcaaagtcccaagtaagaaagacttacgaatgaacgaaattgattcaatgaaatatcatttcaattgggatccatggtcttgaagctatacttgttttatgttcatatttggccaatcacgccaggatattaatcccaaatcatccatatataccattacatcatcttgacatatctcttcgatacaaaaataatcttttcacttacgttcctcatccacaaccgtgtggggagtgaattcgctatctggcaacatgttcatgctgtcctcctctgcgtccaatttgtaattggtggcccagaatccaataccgcccacgaaggcgaggatggcaaccacggtgtagttccaagtcaagagaggatcctcagccagaccaatgaaagcctgaccaatagcagacgagaacgcgttcatcaggagggacacggcctgcacgagggatcgcatgttctttggggccttggtgtaggcatactcaagagaagtcacggatgcaaggatctcagaaataccacccatgatgtaggtcagggcctggacccaaacggagatgttggtgtattcgtgtttcacctccaggcagtagttggcctcgttaccgcagggtcccagcttgtagatgtagtattgggtgaccgcggcaacgaccatactgagggaggccacgataaaaccagccgtgatacgcttcaagggggtgaagttgaaccccatcttgcgcagacaagggtaaacgagctggtcgaagatgggaatgaagatgatcagcgaaatagggttgaggttgttgatgatgtcgttgggcactcctccaagtttcatggtggccgcttgagacgtcaggttgttcatcatctggttataggcgagccctaaagatggtcagcttgtgtgaatatagtagataagaagtgtccacgtacagtaaagggggtaccacaaaaacactctgcaggcgagcagtcctcgtcgaacttcatcaacccacgcatcatcaaagtccatccacgcgggcttgttggccccgaagttgctgggcttggcggcggcccacatatcggtatcagagctccggaacctacaaggaatcaaggtcagtaggtgtaacattcggagctgacaggatgcggcttaccatcgcacggggttcagggtccagtggcccttcattgccaatttccacaccttgaaagctttggggtagattgaaccactgggaggagtgaggatatagtgcttcttgcatatgatcaacaccgtagggcacacgcagaacatggcagtggggagaaggtaagagagccagaaaccaacatatcgctcggcgtagaccatggcgacctgacccacaaaagaaccgatgttgatcatcatgtagaagtacaggtagatacgggaaacggtggcggacgggtcaacgatgacacgctcaccggtagcaagtgtcgtgacatagggtttgtcttcgcgatattgttcggcgatcaggggggagatgttggacttgaaaccacccgttcctacacccatgataataagaccaattgaaaagcatgcaatggctccattggggcttgcaatcacgttgggaatggcggaaatgatgagaatggtgtgtccaagaagtgcgcaggcaatcgcggacaggatggtacggtaacgaccccaatattgatcagccaccatggcaccgaagaggggcataacgtaggaccagaacgagttgactgtgcaggtcacacatattagcaatgaactgaactctcgagaccacattacttacacaatgtcaatccggtcgaggcctgttggcccattcccagagctccgggtgaatcattgctccagttggagacacctggaacgagggcaccggtggtggatcccgtgggcaaaggtcgctgaatgaagttgacgactaattcaagttagccatttatcccctctctctaagattggtagtccatacaaacagcagtggtaccgtagtacgagaaacgttcgcacagttccacaaaggcaacactgtatgctgctatgggtagtttgccggcaacacggcgcaaagtggctagttcctcatctgtaggagaggttttatccagggaataatcgccttcgattgacgcatctcgcagaggaggggcactgtcgatggtcaactcatcaactaccgggcccttctcgttgataccgatagtgtgtgagactgccttggacttagcaacctcagccacatcgacaggatcgctggcattcatcgtggcggtttggggatccagatatagagtgaaacacacagaaaagaaagaaggagaaacctgcggcagggcgaggtgaagcacttatatggcccatggcgtgattagcataacggtttagctcgaggtctccaagcgtctcattcacgttccccccttctaggcattctagaatcccggagcaatagctgcattgggagatggcggacggtaaaaaccgtcaatagccggaagagaccctgcgtcgaggacttttcttagattacgcctgtcaggacgatgggtggctctcacgctgagattcggcctcatccggtctgagcgcctgggacgataagcaaagtccggcttttgttggaaagcgcaagagatcccggaagcctaatggacgccagaacttggatcagccaatcaccgagccggtcaggggctttgaccccccggctttgggatccacttggtactacccgttggacctagcgcaaacctagtttgtcttggcatggggcttggcacggcttggccgagtatctccccgcttggctggcaacttccattgtaaccctgtagtcttggctattccatctgccctatcacaagcaagacacggctgataaccgaggtgacatagctgatatccgagatatcgttgtccaagattgatatcgcctggtctgggacccaatcatacttatgtacggagtacctaggcaggaaagcaacatggcgaaaatgcggggcttgtgttgattaggctcaaggtgaaattgccactactttccccctggagaagtgagacatggtgtgattggccccatgttatggcaacatcaattacccgactcttttacaaactgctttcgcgcattgcctcttggaccgtctcttgggccgtctcttgggccgtcggtgtccgagaaccctatgaacctcatgactatcgagctgactacctgtttaattgttggaaactattggtctttctcgctgggcttacgcgatgcagtcttttgattgccctgccactttctcagcccgcgcatcgtcagatattctagggataatggcatgtctctttcaccaccgtgtaataagttgtaatatccgaaatcgctagagtcttgcaaagatccagtgtgttatccgtcagaacccttgtatttgatgtgaacgggcgatcacccggccgatctcaccacgtacatggtgtctagtcgtacggtggagtgttactcgcactcgaactgcacgggtaactccttgatcattggggcgttcatctggctccttgctcacttccactttcgtaccctcaaactcatgaaccccatgtttggcagatatgttcaccgcttcgtgggtggcgggcgacattccaaccttgcccgcttactctgcattgaccactactacctcggtgttcgtgcgtgttccactggcagttgattggacgataatatcactccggcggtacaaatgtctgcgtctgctgaactgcacgtagccaagttatcttggcctgccttgttttgagcccatatccatccccgtcgcgtgaccatatacctgcgtccttgcattgtcagattgtattcaaatgtctgctttggggaggctaaaatcgaaggcagcatggataacccggtaaagcatcttagaattttctttgaactgctaacccctgtttatcgcattggactaactgaacatgggggcattgtgtaaacaaaggtcggctctagttgcgatatacctcggtttaccgagatctatatcatcattttcatttttttcattttttttttttttttatatataatatatctcaatatctccccctgcgcctattttggatccttcatcgaatctctcgagctgacaacgatctagtcgaccaaaacccctgtcgatgctaaactcgaggacggccattgcccgccatgtctgtgaaacaaccgagaaagcccttccccccaacaatcgtatcacctcccaggaagacttcctccccatcttcggaactgtactcctgtctcgctgagcaatcatcccaggggtaccatagccgctggccaactgagaaatcctccatcgcctcttctcttacatactttcttgtgagatcccgacaaagtgccctcagtcagcacaatttctcggtactacctcgaatcacatcaactcatttacgagggagaaatatcggaaggaagcccgatcgctctgatcacgagatcccagccccgctccgataccagttcgcctcgacgaccccgtccaaatatcactcgaagcaccacgatcatcaagatgctaactagtcccatccctgatcgcaaagatgcctcttgaataggggcttctacaccgaacaatgagccttgtatcactctaactaagacctccacgatcgcacctttcttaggtccacgctgatgactttggtatataacttcttagacaattagatcaagttggtctcatcatcccaccccaatcgcaccggcattccttccgataaatcggcttcggaagggaactacatcttatctgaccaaaaccaaggtcctgattctcttcgagatgggaccgacaaccctgataaaggccaagatccttcccttgatcccaacccaactccgaaaggcaatcacacacttccttcccagaaagaacctagattagattactagactagggctgatcccaccccgatcgcgccgacggacactgcatcttttttaaacagtcacaccgatggaccgtagcctcttagaaatctagaagattctaccctcattccagtctagatccctaaatctctgacgagtttccactgggataatccccctcttatccatcagttagaggcggtatcatcccgtccagcgacgtaacatgtcctcggttgtgtttgcatacggaactaactctgataagtgctatgtattgccctagtccgtctgatatctacttgttctggcatcagcatataggtgctcgaaaagaaactgataattccccacttgcaaagccatcgacacaatggaattgttcgatcatagcaacccgacgagaatgccacctctgtcttaccttgagtcgaccatgagcggtatgttcgtgtatatatatctctaatagggacgtatcgatgaatgtgatgttcgattttactggaagagaatgactttccgtggtccgacgaacagttcataatgcaagctatgaagaactccactggtgggttgaatagtaaacaaagcgaggcgaaagttccttcgactcgaaaaataatctcaaatgtcatgatgcaattcagcctttcagccactctttagttcgtcacctgtcggttaacccccttctatttggaccgatcagagacaccatcttaggtctcgaatacacgggtaatgaattacgctttcaaatttatcaacggggtaaatcactacctcgataatcccgatatccaattcatctactttgactccgagaatgcggaaaaggtcaagcatctcagcgggtgcctttcgccgcactttcgattgtatcactcagtcaaaaaaaatacgagtggttttcctgctgaatgtgaaggcgtatttaatctgccttagtcgcgagaatcctttcagacgttgtggcaagagaaggaggggctggtaattgaatctagattccatgagaaccatcctttcaatgtattgcagggcaattcgattgtcattgccgacgaagatgggcatactttgccaattcttcttttccattggcaggatggcgaaagtcttcatctgaaaaaacaacggcttgcccaacaagctgaatcttttatatatccttgacacgaacttccagtcttgaagatggcgaatttggctttggttccatcgccatgaccagttattcacagtgggacgcatgaaatggtgctcgacagtccactcttcgtgcagcagtttccgcaaagataatggcctgtttaacatagatattgcacgcttcccctgagacttcatgcgtgttctcacgcaatactgtaaacagaaaggaatgtcgttgtttgaaaagaaaaaaactcataatcattcggagaacttcgtacgggagacgatccattttggcagtgagtgatagaactaatagaatcgggatacacataggccgcgcctatataagttcaataagcacatgtaatatgcacgtaatgacacctgagtttccgaaaaagccagtcattgactgcaagcgctcatcatgaatagttcacactgacctgaataatgcagtatattcgatatttgttggtcaacgtgaataaactcaatcttgcccaagaaacgagccgtcatgaccactcaggcacatcctcgtggctatgacgggattggggatgagcaacctatatgtatgatggatttctctcgatacatcgcaggtatgggggtttcctagggccacgttctcttttcatgtctctcatatcacgcagacctgctgatacagagtgtgatacagaagccatcaaaatgtcaaaaccaacctattgagttcatttggtgagagagctcttccaacctcatgtgccattggcctatttgcctagaaaagcagggtattcgaaaaagtacctttcaactcacacagtgtcatggtggaaaatggatatgccccgtaggcccggtcggaacattatttgtccgacgtgcattcctctcggcggccacctacaaatcttctggacagattgtactatccaagcactgctacacatggtatacatgagaaagattatttgcgcccattatcatcgcatggctagtgcactggccgatctgccgcttgaatttgcggctatgtttcttccactgcacctcagttgccagcagcacagagtgccgaaggtactatctttgctctatatcagaacaatttgacgactaccgatcgtatcctcgactatctacagaacctatttttcttcgacgcctcgcggcaacagcttacagatttcgtcgccacctaccaagataacgaagaagacggctcacccttccgcacaggattcgcttacaactggtacatataaacgactggccgccatcctgggcgatctttctttcaccctcatgcgccaggcgttcataaactacgcccccaaagcgaaacaagtcgtggtcatatctatcatcgtattatcatggtcttcccttcctagggacttttcacggatccgatattgtgcagatgttctatggggtcctaccaaactacggatccaaatctctacactcatactgcttgtcgtttgtctatgagcaggacctcaatgcaaaggctggagattatatgcattggccacaatggggtaataaccagtcgctgatgaattcttccatcgaccgtggtgccctcatgccggatgactttcatcaggatagttatgaacagatcatggcgatcctgccgcgttctatatgggaatacaagggagcacaagggaatatattaggagcttcacgaattatgtttatattatcctaggatctgatctgggatttggtctgcacggttgtgctcataaaatttaggcaagaattaatgacattcgcaaaattcagggatggatccatcgatctctaagcaaaatctgtgttcagaactaacgcccaattcagttccagctcgccgtcacagtggctgtacttccagaacacccattcggcaccgtataagaccgattatggtcgctttccaacgttgtagctgcagatccggctgtcttgaggaatttgtgctggatggtcattccgacgaggcgtgtgatacttgtacatctccatcagctgggtgccagatgaatacccgctccaacttgttgacaatgtgtaggaggatccggataacccggccttggaaagcactgtagtgaccggcgagctgcccgccttatttgtttgtggccatgaacaaagcgagacatgtgcgttggcgaagctcttaggtgaatcaacggagttagcagccagacccgatttataccttcgacttgtattaccgttatctcatctaggtcagcacaagacgagcttttgttcgcggtaatatacaccgatgtaagctttgcctagttcaaacccaatcggttaattagagcagacgaaaaagttccaaattcctttcagagcaccatggaagccaagaaacgtcgcgtccagctcacatgtaagccacctttcaccaaagtgctagttccgaggcagatctggcgggctggcgacggggataatttaacctggtgattggtggatatcagccaccaccccggattatgccgtaaaaataacaaggggcggagattcaacggaatcaaatattggtgaagttgattctaacgtggttgatctaagcgattgggatgaagatcaatggtcggacagtaagacctccatctgtctcggaagatattcgacccacctgaagagagcaatgatgggccggacatttgaagagttaacaatgaagccctcgagtagcgctgggattatattccaagctgacggtggtgtagcggggaattattggacctctgattgacggcatttctctcgccccggagctcattgtctctgaaacaatgtgctgtcatgcaagtcccacacaagtgcattgatctgccttggaattccaagtgcgttgaatccacttgcctgtccccgctataaaagcaggtgtcgcccccacaatcatcccaaaccaacttaccttctgacaccatgatggcttctcacttttgggctgctctttgggtgctcacacttggctacgctgttgtagttgcaccacagatattggtccctcgtgcgactggcagtctggacgcctggttggtgtctgagacagcagtggcaaaacagggtatcctcgataacattggatctgctggtgcctatgctgcgactgcaaagcctggcattgtagtcgccagcccgagtacctctgaccctgactgtaagtattggatagctatttgtggcagcggaaaactaacttaactggcctacagactactatacttggactcgtgactcggctctggtgttcaaaactctggtcgatatgttcaagaacggtgacagcggcttgttaaatattattgaagaatacatcgatgcacaggcctatatccagacggtatccaatccatctggagatctttctggtggcagtggattgggggagcctaagttcaacgtcgacgagacagccttcactgactcttggggtcgtcctcagcgtgatggaccggccttgcgagccactgcattggtctcgtttggccaatggctcattgtataaaccccgaatctgttggcttttgcattgctaacccatttaggataatgggtacaccacttacgcgaccaacattgtctggcccgttgtgcgcaacgatctctcctatgttgcccaatactggaatcagactggatttggttattacacctcaaattttagttgcgcacatttctaatgccctatagatctctgggaagaagtttctggctcatcgttctttactgtcgcagctcagcatcgcgccttggtggagggaagcacattcgcaagccaggttggttcctcgtgttcgtactgtgactctcaggctccacaggtcttgtgcttcttacagtctttctggactgggtcttatatcctggccaactttggtggtggccgctctggaaaagatgccaacacgctactcgccaccatccaaactttcgacccagaggccggatgcgatgacaccacattccagccttgctcagctagagcactcgcaaatcacaaagttgtgactgattcattccgggcgatctatcctgtcaactctggtattgctgcgggcaaggctgtttctgttggtcgatacccggaggacacatattacaatggtaacccttggtacctatgcacattggctgcggctgagcagttgtacgatgcgatatatacgtggaatcgtatcggttctttgacaatcacctctgtctctctcggcttcttccaggatctgtacagctccgctgcgaccggtacctactcctcgtccagtgatacatacacctcgattctgagcgctgtcacggcatatgcggatggatatctcagtaatgtggtatgttgcatgctatcgactattgaccacctcaactgacagatatcctaggaacaatacgctgcatcgaatggctccttgtttgagcaattctccaagtcagatggctcacaactctcggctcgtgacctgacttggtcctacgcagccctgcttactgccaatgaccgtcggaatgcgatagttcctgcaccatggggtgagacatctgccagcagtatacctggccaatgccagtacacttcggatgttgggactttcagcagtgcaacaaacaccgcctggccgaccacgttgactagtagatcaggcagcggaactactaccactacgtctgcgaagacaacctcgactacagcaccatgcactactccaacagccgttgcagtgacattcaacgtgattgccactactgtatatggccagaacatcaagcttgctggatctatctccgagcttggctcctggtccccaagcagtgctattgcgctgagctcttctttgtacactacgagcaaccctttgtggtttgtgactgtgacacttccggcgggcactgggtttacctacaagtatatccaggtggcgagtgatggcactattacatgggagagtgacccgaacctgtcatacaccgttcccaccacgtgtggtaccacagctgtcacgattagtgatacctggaggtgataactgaagttttggatacctcaattgaagattgtgcatgctttattcttctatcgtcgtagaatagcaccatgataatgattgtttatctgagtattagctgtccgaacacaaccaccgcctgtccattgtgtaggcgctgccgtttgaactattacctgatcgggctaaccttaccgataggctggtacggtgatgcggccgtcacatcataattatatcaaagtagtgaataaatcgccgcaggatgtaatgacggagggatgatgtgtgaggactccatataagatcaaattgagagccgatgaaacctgaaatcaagttctttattgtcacttcgttaaaaacgtcttagtcaaaccaacatgtcgacaacagaggaaagagtgaacgagatgcgtgggtacaaggcgtaagtactcacttttgtgatactcatgagcatatctaattagcaagtttatctttcatagcacgctgagcaacccgagagtttcagaacgggcaaagcagcatgcacacgacaggcttaatgagcttggcggtgataagcctcgcgaggaactatttcaggcaagaggcgatcggaagaaagacccaacgagggtcgcagctgggtataaggcgtgagtataaataagtcttgggatgttcttcgcatatgctaattggcctatatagcgcgcagcacaatcctaacgtgactgaggccgggaagaagaaagctaccgaggagctacacgaaactgttccggaggagtagagaccttttggttggttttacctgatatgtgaaactaagtgtgaaagtatatgttggcgtcacaatattatatacgttccaatgttatagggcagtgatctgcacagaagagacgatgcgttactgtaggagactaacacactttgtagcaggcttatattgcatacagtagtgaagttccgatgaacaaaatctaaatttgatggcgcgtaataaacagcccgccgaatgacgccaaaagcgaaaagccaagggaaacaactatagcacgtcagtggaagataccaaacgcgttagaatccatcaactcacgatatgtatgcttaagtcccaaaacatagcaagccaccaccgtctcccgcagatggccacttaggtgcgcgatataatttgtatcagccatcgcacgttgaataacctagagcaattaacatcagaccaaatgagcttcgccaagaaagtgcgtaccttctccgagccaggtccgtggagattaagtctcaactgccgctggaactccatccctagaacagaattggacgtagttacacccgccgtcatggaaaatcccacaataagcatatatcccgccgtcgccatagcaatttcctcaactggcagcatggcagacatggcaataaacgatgaggccgatgcgattcccgtgccaagtccaccgggaagaataaatagtgactcccagaagccgctgtgtccatcccagcggaggtaaaggagcaggtaggaaatggcggcaactagaccgccgatgacgagcagaattttgaattgtcccgtgcgccgaatgaatatgcccgctactaatccgccgagagtatttcctatcactgctggaatgagatgcacgcccgccattgtggtcgatgcgcgctgtgtcacttgaaaatatagtgggacagagaacatcattcccagctgcgcggagatctgaagagcgccgattatgtatgccaatgatacgttcgtacgccggagaatacggagattgaagatcggttcgggggctacgtaggcttccacgagcacaaaggtgatcaggagtaatgcccccccgcctgctaggaggactgtccaccatgagctccacgggaaggacttcccgccctggtcgaggagtgtggtcattgcgataatggatgagcctagcagcgcggttccgaggaaatcgacctgggcgagtttgttcactttggtggagtttgctttctcaccgacgttcagtttaacaaccacgagagctgcagccagagcgaggaacggagcttgtaggatgaacaacctgggatgtggtcagaaaatacatacagctatcggataagtggaaactcaccatctccatccgatggtatcgctcagccaaccacccaacggacctcccagactacgtccaagcgtcatggcaatgttcacatatgctctccaagtagcgacctcgcgctttggaacaatatctgtgatgataatggagctgatggtcatgattccggcaccgcccattccgctgatcgcgcgaccgaaaaccaccacccacattcgggttccgataccgctatacatgatcagatttgcatttcggctgttgggtcaggattttgcctacctcaatatacagccaactgcaaataacagatatgagagcagcaacattggcttgcgaccgtagatgtcactcaattttccatactgggcgataatcagaccttgacatgtctccggtgctggtcacgcccactcaccattggctgtgcagcacaaagacccaacgtatagcccgttgagagccaactagcatcgcgcagacgattgaattcggaggagatccggcctgccgccgccatgacaagtgttgcatcggcattggaaacgaattcgcctattttcgattagctctccggtcttcgtatatcgccaattttcgtaccgagcagaagcactgcgataattgtcccaacacctgccaatgctttgagcttaggctctgtgttagatggcgggagtaatggactttcttcgtcttgggcatggctattggcatcaatgccttggggtcctatgacacccgaaggccccggctcgaccgtgtcgctttcgatatgggccatgttgggaattcaagagcgtcgaactagaaaatagcattgagggggtgtcacctgcggataaatattatgcaatgtttagctaagttgtgctcatcggagtgataaagcacgccatatataaggtccactacgcgtacttcacgaaagaatacatacgatgttttataaaatggatgtagtcttttatctagtcaacgtattccgtacgatcatggctggcgtgttaactcacccccagtcgaccccacaatgagaatcaagtggttagtgccccctcaaggataagaattgtcgagcttccggagaaggttgagaagattcccatacgcatgcggatgaactttgaaactaaattgattggaataaaccaatgctatcctattcttgctagatgactaccagactgcataattcagtccatcttctccgcgacatgcagtcgattacggtaagggacaagtaacgatccgaggaaccgatggtatcccgatcgagctagataccgtacttgctccaatcgagtgtttagaagaagagctgccagtgatatacgttgatgaagaaggagtggacgagatccttcaacgagtgatcgatgatccagaggatatcgaggagctctccgatcaggagggtttctaggagccccgatgtcccaccctcgatcggacggggcagacgttcgaaatatccgagggaccctcgcttgtcctgatacaagagaaaagttgcttctgcaaaatcaccagaacccaaattcctacagaagaccagagacatcgataagacaacacgaagatccatacaagaagggtgcgaaaaatcgaaaaatcatgaaaaggaagacattctcaaagaaacgctcgacctctgagcctccttcgccctcgccttcccattctgcctcggggcatagaacaagaggcccaaacaatcgctcatcacaatgcctatgacgacccaaatctcccatgtctgctgcactattcaagaaccatgacccgtactgtctcattttcaagaaaattatccttgtgcaagcgagaagggagcttgctcttcagccacctaaggtaggtggcatcacatgttgctatgttgatagatagcccaatgccatcctgagcgataacgaaatgactatattttatattgttagcatttctagcctaggccagttgatggtatatgagccccattgatcttgttggtttggatgttggtcgttccctgaaagtagacccatgcttgagggactcgggagaaaatggtcgtcggcggcatcttgactatagtggatccaattgtgttaataacagaaaatacagaggaatgcagggtaataatacctaacaagatagacagagaaagttagatggaagttggatagggaacttctcgaccgatggaagaaaatcaagcatagtgtagaagtgacaaatagtgcacgtcacccatcattccaggttttatcttcaagttaacttgtatgcttttatctctctctctctctcccccccagtagcctcaatataccctggtactatagttactctcacttcaagttcacttcatcaccaaccatcaaccatcaaccatcaaccaccatccaccatccaccacttcgaactccccgtcacagactctcttcggacctactcatccactaatttatggctactccaacatactggccacggagtagccaacaatcggagcaaaaacgaaacggacaagggacaatgaaatttgaagattggctagacaatcagacaagtgaacacccttatttgcctagttgaccattgaatgggttcgaacatgaaaggaatccctacaaccatagtggctgggtttctagcaatattaagagtatagtagtatgtgcactcatagtcgtagttgaaaagtgacgccgtattccataaaatatgacagtgcatattcatttgaacgtctcgacttattaaatttaacattatttcaagtagaggccttggggttcatactatcacacagaactgaataaaaaacatctcagcgacgacgcgagccttgcattttatccagctttgccagaattcccactgcacctacagccccatatccaccctccctccagcaggtctcgatgatatcccgggcccagatttgcttgcccagggcgggaagcatatcccgggatggaaacctggcgacagagtcatcactgccactgtggtgatagagactgacactagtccgtctcccagtggcaatctcgtagaacacgatgcctagctggcagagatccgtccatatggaacaattataatcatccaccgcatctgccaggacggcgtcgatgggcatgatactcgacgcaccaaggtcacaaattgcgacgttcaatgaaccatccagcaggatgttacggctgagaatatcactgtgaatgacgcaagattggtggaggttatgaaggccgatggcaagctggcgaaaccagcgcttctgaagctcgatgctgggtcgtgccctgtgccgcagccactttgacaacgtacctccggacatgtatctcatctctatggtatctccggggaggtcgaggcaatgaacgatcccttccactggggtattgaagtcgggctgaagacgccgccagacttcttgctctcgtcggatcttgcttcggttctgttccacttcctccagcgtattattcttgtacaccactgccattttgattgccacatcctctcgttggacaacaactgctgcatcgccggtcgcaagtattgtatgaggcttgatgtagtgaccctcatcgtcgatgaggtgatacagagccctcatttgggtgatgtgaaagcgatttgggggaattgctgccggtggtcaatgtcttcgatgggagtagaatttctggggaactgtttatttttgtttagatgatctagctagcaaatgattagttagttatgatgtataattctgtcagaaggagaggtcctacctgaagtcaatgtatgtatttggtcttgctttcgacgaatagccaaagtccagggactcgctctcagaggcccgcggagtgaattctctgatttgaagggaaggaccgtggaacctgcacagctgggatttgaccctgtgcgattgcttagactgggatcatggcctcttggggatgcttgaatagagagataaagtcaagaaaccgccaaaggatgtttggttgaaactggaattggtggtgctgatttgatggcgacaaagaatgaaagcgagatgaatgaaagggagatcaatgagagatggtgcctttgacaagatgaagtcgcagtccattcatcgccgtttcataaaaaagccatgttctcctttcctttttcagaaaggattgagggtgaactgcccaggcaaggcatattttgatgcttgaaactggacaagattgcactggaaacacatcgtagttgaacctggaaaatggtcagcgggaatcatcttaatacgtgaaatcgcaaagtattgaacaatattcaaattgaaccctgctcacttgatgtataataacatgtagttgtatcaagacgaggagagctttgctgccagtatatgtattcatagaggataaagaaaggataaagaaaggtagagcccctcaggtagagagtcaaagcaaacaggcaagcgatggatcgaggaccttggcagcaaaaagacagatgtataaattattactgctttccacttccttcatgatcacaatatgcatatatacagcgttggttgctgttctcatctattttaatctaactgcttctataaattgcctcaaaacgcccatcacttaaactgaacttggcgcacatattcatcacttattcataattgatcgattcactgctcgtgcgtgagaacatagcggtatcgagcatcaccattctccatatcgacgatggcctggttcgcatccgtcattgggcgctcctggatccaaggcttgacgcccttggcaacagccaactctagcatctcccggatctcactaggactgccgataaacgagccaccaagcttgaggcccttgctgatgagcagggatgccgggatctcaagagcgccatcctcggggactccgagctgaataaaggtgccgtggagacggagaagtccacagtactggacaataggcatcttggaagaggaagcagtggagatgatcaagtcgagagagctagcgttgcgggtatcccaatccttatcctcagcggtagcgatgaagtcatccgcaccgagctcgatcgcatcggccttcttatcggatttgcgggagatagcgacgacgcgatcagcaccgagtgccttggctaacataatagcaaagtgaccgagaccaccaataccaatgacaccaacggactttccggggccgcatccatttcgcttcagaggcgagtaggtagtaataccaccgcagagcataggtgccgcatcggcggaggagatgccatccgggatcttgataacgaagtgcgaaggagagcggttgtatgtggaatagccgccgtacgatgtcccaccgttggcataggtaccgttgtaagtcatgaccatattatcgcagtgttgttcgaggccattcgcacaaggcccacacttcccgtccttgttctcgcatgagccgctctgcgcgccaacaccgacacggtcaccgatcttgagatctccctcggcatgtgatccgacgcggacaactgttccgacgacttcgtggccgacacagcaagggtagttggtggcaccctgtgaaggccggtgttagcaactgtattcgatgcgaatatgttcaaaatgaatgtgccatacccatccatccgcccatccactgcgcagagtgtgcaaatccgagccacagataccacagtgagtgaccttgatatcgatatcattctcctcccatggcttcggctcgaattcctgccaaaccatctttccttcggcggcttcagggccaaggcctacccagccttcgaacttgtaatcggtggaagacataataaaaatgtctatttgggttcaacggtttctgaattcaatggatgagatcgacaaaccattcctacagggtcctccactatttaaaccacctacacggagagatcagggtccgtctcggagcgttattatgtggcgacgtggtcagcaagtgaagaaaaggtccactcgacccgtcgagtggattgttagtggattttcatgcgtgggttgtcaccacggtcttgaattatttgcgctatatccggcgaagagatttcatttgaacgcaaatatgttgtaaatccccggcagcgggagagggaaggtagagtgaggcataccgtagacaatatcacatcaaacctacacccgaggacgttttcccacccgtatatcctccatgtttaccttccctgaggagttgctgctttacttccaagtatgcatgacgtcagacataaacccactaagcccctggcttacgccgacttatacccgacaagcttatcttgtactggtcgggtccattaggtgcctagtttcagaaaagaatgaaaaatgcttttgattcgacatgattctgttttagtggagaatcttcgcaggttttcatagccaattctatcaagctttcgcatccactccatccgaaggaaccgctttttgccggcggaaataatattggacacaaaggacaagagcaatgacccatgaggcaccagcaagggagcaaattgcggtcagaccatgcaagtacttcggcgcgtcggaagtgcggaagatctgcgagccagaaataccagcacagttggcagccattatcaccaacgccatcgcaacacttcgttcctggggtgtccggcagtagaatgacagccaaccgacattcaaaatactaatgtctggtcagcttgggttatagacacgaggggtatggaactcactgcatgctgcagtaggaaatattagcgatagcaataacgccgtaccggtgccatagcgaagcgtgggtattacttgtacgaagacaagcataggaaattacattccaagtgatagctaggagcacaaagggtccacggtgtctcgttttgtctctgtcggcagttagaatccatctcgtggacataatggtcatattaagcactcacgcagcaagagacagagcaattagccagatcatgctgcagtagacaggaaccgaagctaaagcgttcgccttaacggcaccgaaacccagggctttgatcatgctgggtgtgtattgtgtcagaccagagaagccggacatggacaccaaagtcaggagaacgtgctgcatgattcgtggctgtttgactgtctgccagatatctgcgcccgaaatctggatatggcccttggctttgaggggatcatttagtagaacgcggttacgaatgatgtgcgactcgcgctcagtgaaataactccagcggccgaaggtgatcaaggcacggccgtctccggctgatggaggtacgaggagggtgaagacaattgcgatgaagagggtcattaagccctggactggatgattggtcagaagagctcgggctgtataagatcgatctacacttacccaggaagatccatctccacccctccatgccatgggtaccactcagctgaagcagaccggcggatatcaagctcgctgtagccgatgcgaacatctgcccgtagaagaagagactggtgcgaacgctcgtctcctccttcttataccaggtagagaggtagtatagggcacctgtgggttattagccgattatccagtgcgaagataacgattgccataccaggaataaaaccaccctcacagaatcccaacagaatcctggtaaccaggtacgcaggatatgattgaacaaaggcctggaacgtggcaaccaacccccaagcgaacaattgacccgacaaccagacgcgaggtccaattcgctgcataatgatattcgatgggatctcggagagaacgatgccagcggagagcagttgggatccgacattgatttgattcgttgtgatattgaggtcttttgtgatagtcgatgtcaaaacggcgcttatatttccgcgatccatttgcaaggcgaagaaagcagctgcaagaatgggaatgatgatgaagtcgattctgaaagacacttattagtgaaatgttcatagttggtatagggacaagaactatatgtacttccgtcgaacggccggttcttctccatcccaatcttttacaataccctggtcaagctcacttggagatgagtcgatgacctgctcccctattttgttcttctcgtcgaagatgccttgatctgccatcttgcaatttgaaggagcttaaacccccaaaaatgaacaaaactggaaatatgtgtggacgttcaattcctatggagggctttacaggaacactgttcttataggaaaaggagaagcacaagataaaggattgcgtaagtcaatttagttaaaatgtgctaaacagcaccaactccgtcgagtgcgttttgacgcgacgacttcttgatgtcgcgagatggggagatatggcgcaatcacggatttgggatttgccaaggatctggggatctgggggttattggcctctagatagtgatgtggacattgaataacaggaatacttgaatataattgattggcatcgttatctacaatgtaaaattagcaaattaactacttctttacacccacacatcccaagacaccccgtgtcgactagtcaacggcacctgtggcccctcagcttcaacaatgtatcccgcatcacaccagtcaaatgagacatggggctgtgcgctatagaagccatcatactcctcatttagagcatcctggagagtactaaccgggtctaccggttgaaggacatcccacggatggatgcaagtcacaccctggcatgacttgaggaccatcaatagagcgtcgagtcgattgatagcctgggtcaagttgcgaccgagaatgcgcggttcattgagatcctcctgggaggaagtcgggtacagattattcaactggtatggatcggtctgcaaaagggttagtcgttgtgataaagaaccaaggtactatctactcaccgacatatcatacagttcatgttcattgttgcaccagactgagtaatacagactgtatccgtctccatgtaagcggacggatttgtaggtgttatttgggatcagggttgagcctccgggacctgccttggaattagtacttatcccacaatggccatgaaaacgttggactgaccaatgccgctataaataccctcaacaacagcagaaccccaatactccactgtaacatgttcatggcgctcaccctcaaactcgggcgtcatgggaatagcggtaccatcgaaatcatccctcggcggtatacccgcaagatggaacaaagtcggcgccaagtccacatgcgtagtgacagcatcctgcacatatcctttagccacgccaggtccacggatgaacaagggaacgcggatatcctcctcaaacccgcaagtcttcccgggcggcagtctgtgctggccaatatggaacccattatcggaggtatagataatataagtattatctagctgaccactctgctccagccgggtgacaagcccatcaactaattcatcaacaccctgcagggcgcgcagacgtgaacgataaaagtgatcgttgtagtcgacgaccgattggttctgcaagggtaggtcgtgaacccagctgactccacttggctacgcaagcaaatcaaatccgtcagaatttgcgaacacaaacacgttaatttgaatcagggccgcgcttacctggtccggattgaaattcgccgtccggggcactgtgacaccctggaacaaatgctgatgtcgttcgagggggacgggcgcggacatgtaaaagtttcccgacgtgatatcgccaggatcgacattcgaatgtggcgcgacaggcgacactgctaggaagaagggcctctccccggccagtgcatcatcgaggaaacccagtgcttttcccgtgatcacatcgatggtatgttcaccctcgtggctgaccggtggttcatggtttcgctggtaagtcgaattgagataagaataggtgtaaggatcgagaaggaaatccgatccattgaatccattgatgtgtgggctgtcgtagttatacacggtatgtgcgttgaacattttcccggtgtaatacgtatcataacccgccccttggagccacagcgggaggaaatcatcgttgaagccacgctcaacgaatttgggatatccgccgtatggtggatggacatcggtcacatttgtattgtgtgcctggcgaccggtccatagactcacgcgcgacgggcagcatagggctgttgtaacaaaatggttgcggaaaaaggtgccctggtcgcggatgtgtttggagattaggggggtataggagattgagtcgagttgcaagtcttggtcgtcagtgatgacgaagaggatatttggcttgcgcaattgtccttcgttgggtttcagtaccgattggaggactgattgcaggttggattggaaattgagggctgcaacgccttcgacggcgacgaggccggcgatggcagtgattaatttcattgtgtttgagaaagatcgcggagtagtacaagttgtatttgtatgcaatttataaagaagctatccaatgtggagaaatgtggagataacgatgatgccataaatggccccaatggcgggagataaagtgaagttattcagagtcttcactttgtacaacatcggacagtttattttcacttctatacaatgcaggggctccttgatgcttttcccacctccgattgattttagccaagccggacaaggtgggaagtatctaaacactcgttcatactactccaagtgccatcaagacagcatttttgactgactatgtgtatgtaatataattgggaatagatacagtagcctgatcaaccatcgagaaaacagtgtagttattcagtcgtgaatggacagagggagaggctctatcccgtgtgatgccttgttaacaaggcatctagccaatttacatgtggctaatggtggctaaagtcacgtgtgtattagctggccaagaagcgccttacccgaagtagtttagaccgcgtaggataagcatagttaccaagaatatcagaggctggcttccaagtaggatcatcatgcttagttcaacctcttttcgcttagttgcatttcgggaatcattcaaatcaatcaaacccaatacattgtgcaatctacagttcccttccctcggatcaattccatgaatatgtgcaataaactcttgctagctacgggggaaattgttgagctatgggccctgggtattgcgagatagaatttcaatatgtctacaattagtttgcttgtgccttgagcacctcgttctttgtgttcattttctctaggtgtagtacccatgattaccgccattcacatcagtttgaagtagtatcctcgttcatattacattagtagtagtgcattctgtatttagtacagacccgacacactaatataaatctagatgatattttatgatacgaaagggcccgtgttagattggaggataggtcaacttgaagatagaactttaaataacatataacttcagaggctaagagttatctaagatttatgtgaaagttatgtgagtgtcaatggtgtaagaagtacaaggttgtagttcaggtacactctcctgtatgattgcttttctttcatcagtatataagtcctctcctacatatccgacgagatattattcctctccatttctccgctgtatctgttagtcgatcatccccatatctaggtccagccctaaatatctgacagggcaagaaactaacaatatcagattcagagaaggttgggcgggtggccaactctaatatatcgagtaaggtgaccagaatatctgagtatggcatgttggatcaacggttagaaatccggaccttaggctcgaaaaactggagacaagagaggtggttagtcttgtggttcacttgtcactatgacgtgctagtagttgtgaggtgccaggtcgatcttggagagggaggagtgcattcaactaaatgactgagatgaagaaagatgaagcaagttgcaaagcagagaacataattatctttctacgcatgttcacgaccgcagtgaatattgtgtcgtcgaattgtattgttcgctagattgctaagcgagaaggttcgaagtttgcaacgtttgcaaagggtaagctatatcaaaaggctgtctggggccgtgataataatgccctgtactacgaagggtcgctttcactgtaaaaacaaaatgtcaatattcatagtattcaaatgacaagcttcacttttaatatatacgcaacgctatgccgaatgtacatccaaatcaaagagaaaagctactttgacagccaaagcggcttcataatagaccgcaaataaaccagtaaaaagaccagcaagtagttcgtaacggtaaaagcaagaaagataccgaaatacggccagatcttggaagaatccagaccaattccagacaaatactgccaacgcagattagcatctattccggataagacaaaacatattccaggaaacaaactcacatcatcaccaaagctatattcacaatatccacattcgcccattccatccgggttggagagatacccaacacctttcgcatcaagccatgggcccgcgtactcactgcaagtagtgttgggtggactctcgaagatagtcaattcagtctgagagcaaacgacagcagtaccacggagaacggaggtgagcaccccaccaatccagtacgtgaacggtgtgatgtaatacattgtatatttccaaaaggcaggcatctgagattgcggacggaggataccgttgaagagctcacacatgataatgaagaagggcatgagggtagcggcgatcattgagtcggcgctatcgattggcaggatgtgttagttgattaagtcactgcggacaagaaacggtgcttggttatattaaactcacctcagagcggcaatccactgaccccacgaggtcgcaaataggaagaaaaggaagaacatcaggaaacagtagccggctgcgaagccgagtggtaatcccaccataaaatagtataggacgaagaagacgacggcacccagaacggaataggggatctcggagatgatctgcgctgtgcagaatgctacccagccgtatacaccactcgggccttctcttgctaaccagatatcgcggttcatgatgaagcgcatagatatagcgttgataaactcgggaaccagcatcaggacaaggaagcaagagaacgcctttgactggaggtccgtcgtactattgccgatctggaggtaggtgaggccgttgataagagcgtggaggaaggaagagtaaagacgcgagtatgggtactcggcggtgcgccaaaactggcgacaggtccgttgagtgaggagtatgatctgctggctgagagggggtagggttgggggcagggaagggggacgggtattcttgtcggagcgaattgaagcgatctcgttcttgacctcggcgaattcttctgagttgcgccagatggctgcccaattcgtagggtttcccgaggctttcatgccgccgacgactacttcgatgaggaaatcggctgcgttggtgactttttccggaatgttgccgtgtcttgcgaaatactcgaagattgcgtggccagattcaccgactgggccaaagtagtatgtgcttccgccagggctcagggctaagacgcggtcaaactggtcttgttaatattgattcgtaagaagggtgtttaatgcttacctcttcgaattgctgctgattagcctgatggatagtgcagaggaccgccagtccctggttggcgagacgtcgtagcagagcgacgatactagttgcgccctggctgtcgagtccacttgtcggttcatctaagaaaagaagcaagtttggccgagcgcacagctccactccaatagtgacccgctttttcttttcaatgtccaaagacccgatcactgcatcttgtaattcaaccaagtccaatgtgtgaatcaccgtttccacgtatgccagcttttccgccgttggaacttcgtggctttgtcgtagcagggcagagaactcgaaagcttccttgatcgtgctgctttcgtcgtggatgtccatttgctggcaatatccgatctgtcggttgaaggactggtcaattgaccggttgtccacgaatagagacccggacaagatgccgggactctctctttgagtgagtgcagtcaacactaaaggttgtcagaaatcaagcgatggattcatttcattgtgatcttacatgtagacttgcctgctcccgaggcaccaacgagagcagtcaaagaccctggtttgcagtatccacaaaccccatccaaaatcttcctggtctccttgccaatctgcacattcagctccaagtcagaccaggagaaagtagactcggtagctgtaagagtctggtcatgctttgtttcatgaccaacaggtggcgctgcagaatcaatcgagacaggcgattcctcttcatcagacttaactttcttctcccgcttggacagcttccgcgagcccttgtattggatagggccagcactatccagctcccactcaagcacctcactcagccaacaggtcatcccaataaaggcgactgtgaaaagacagagaatcccgaaattacgccagacgttgctgtagtagaatccatatctcgcagccaagtagtcatcgccattcacgacagtgctgccaatttgactaccagcataggcacaggtctgatatgcgaggtcggtatattccgaaccggatgggataatggaggctgccgcgcaggggaagttaacattgtggaattcggcggccatgactgcttcataggtatacagagcaggagttgtatatgcaatccatccaacccaaggaacatcttgaatcattttgtcgacggagagaacgtagccgccaaacacgatgcaaaacataacagaaaccccacagtagcgaagagcaacttcaaagttctgcgatagagcggcaaagacacggaattgcgccgtgaggcaaagcgtactcgtgtaaatgaagaggccgtcgatgaagaagggaccggcctggaagagtcagcgtctatactgtgccaagattccgagattactcacatcagaccgtagaccggacaggaagtacatgacaatcaaatacaaaaaagtcaaaagcacagttatcaccatatctgagagcactcgggccagacatacagcgctgggccgcacgaaggcgaatttcttctgtcggctcaggatatcgcgaccctgcatagcttcttccaactccgacatctgcagccaggcaagcaaaatagaagagtagaagagcacacctccacgtgaatacataccctcggtagtctgaggctgatcgtagaacatagacccaatcaacaacccatagaccacgcaagaaattaatttgatgtatagcgggcccatatgccctttcaactgccacatctgacgcttggcgcaaagaacgacctgtcggaagagcgaaatcgtatatggcgacttagacgagacaaagcgcgacttgtcattttgcacagtcttcttgaatacctccacgctgtcgcactccgaatccgccggatacgcactggaagacctaccggacttctgatcttcgtatctttcgacggccgtctcgatgttagcgaacgcagcactctggcgaaaagcggcttcgagttcaatggggcccttcggcgcacggttttcccatccggcacggaagcgccgtctttcgggcagggtgatactggtcaggaaatccgaagtagtctgcatatcagcgcactcatagcccagatcttcgaagtaacgcttcgcctcgtttgcaggcccttggtacagcatgcggccttcatcaatgagcagcaccttatccaccagctcgtagatggcatccgaggcctggtataaagtaagcaaggttgctttgccacatgtatcggtcataatacgcagactgcgtgcataatcgagtgcagaggatgcgtccaatcctctcgtggaattatcccaacatgctactgatgaatcggtagcgagagattcaatgatagagatacgcttgcgttctcctccagacactccgcggatatactcattccccaccaacgtgttcatggtatgtgacatgccaaaaacccgcccatagatctccaggtaccggggaatcctctcccggtagcgtttgggagtcttgctctgcagtgcaaactcgagcgtttgacgcacggtcagggtggggaaatgcacatcgtcctcggggatgtaggccacggcgccacggtagtgcttcctaacttcatccgagctgagaccggagtaatcgattgagcccgtgacacccagaaaggaagagtggtggccagcgatagttcgcagaaaggtcgaacagccggcaccaggacggcccagaacgctatatatttcaattagaccaagttcggtaaggatgagatggcgtttgatttcctgcttacagcatgatctctccgctctgcacgactccggaaaaatcgcgtatcagcggacgcccatgctcgggcatcttcttcacgatccatggctggatcgtccattcatagacatcctgtagggtgagggtccgccacagggctgtggcgaaggtctttacatctgcgtgggagtctccgtcgccccatgttgagagggattgaaaacagacgccgaggttggcaggtttcttgccctggacttgttcctcgaggaacttgtcgaaggaggagtgcggttccgggtacttgggatccgggtggctttgagcggttaatgtgtgatgaatatcggcgagggcatcttcgtcctcgtatgagacctgcactctcggcggttcattgttgtgtttctccttggcaaaggaagagctatgcttcaagtggggatgaagaggagcgggcatattgatccttcgatggtcgttcggaaaatccagacctcattgtactatacatgaagaaattgcacaatcttataaagaataagaccaagaataagaatttaattcaatcaagaaaaaaaggtacgaccacatgtcccgaaaaagaagccaaggctcatgatgatgaacctggatacgaccagccaatccggtggtcgatgagaaagtcaagatgttgctgatggggtccaggcgttatctgaccatctcggtatacagccaatgacagtggcaaggtgggtgcaacgaaaggcggttcgttcttttcaccaattctggcgaaggccttgaatataatacaagcggagtccgcggccaccgcgcgattgttttgcagaaaagggaagccaaggcgagaaggatccaccgaaccattcgagagccaccgaggaacattggaaatgaggattttctattaaccgtatattctggcatattatgtagacgagcctagttaggtctatgtatactctctgatcgagatatagtatcttccagtctcgagtaatttcacaggggcattgtatcatgtcaacccccacactttcctgcagaatgacatttacaccggagaatttctcacgtggcgggcttactaatatatgcacttctgcctcaggtgtcgaggtccttatctaattcccaatccggtctagcgccaccgagctccaagttccccgtctccaaactccatattctccccctcactaccccaaaatgcaagctctctacaacgctctaatccgcacccatcacataacctcccgcaaaaaagtagccgcgctcaaacgagccgcagacacacaccaatgcgccgtactcctgcgctccggcgggtgtccggggatcatgtacgtggagggcggaaaggagccggtggagagctgggtggatgttgtgcgccggttacgatataaggattttcaattggttacgcgacccggcgttgtggaggaggaggatggatatgggactgggaatggaaacaatgagaagagaaatgagagagagttggatctcccgttgggactggatgaggtagagagtgtcaaggagtttggaggcattatggcgaggaggggggtatggaattggtggaggagaggcatggggtatgcttaatgtcttcatgtggatttgcattcatgtactgctttctgagatatccagttgaatttttggtttctaatacagtgatcgtcgttgattcatgtcttcccttgaaagaaatatatcccaaacgccataatctacctatactacatatgtatacaattaatcaaggtgcgtttttcactcaaaccggcgccggataactgagcagcttgcagatatcctacgacagttagcaacgagccaatattcccccatgactaaacatacctttcgttgtctccgatacttatcatatatcatcttccagatctctcgatcccgacacccactctcctgcggcgtgccaggattgttatcacacttcggctgctcagccgccaacatgtcctgcgaccacataatccacggcttcggcagcggccaatcggaaaagtgcacaaacttagcctgcgccaggacatgatcagggtcccagacctcatcatcattccccaggaacttgcgatgatccttcgtccggaactcgccgctcaatagcccatactgccgatgtgggaggaccattgctgagtccccatatcgccgattcaacagctccatatcataccgatggtccgtcaggtttatatcgacttgaccgttctgggtgggtgcggtaacgtcggtcaatgcaagatattcgcggagggagggctcaatgacgaccatcagtgacgagagcagtttgtccggaagaagccagtaagcacgtggcatggcgacagtggtaggcgggaggaagaagagctcgtccattgtctggaggaggataacgtcggagtcgagatggatgacacggtcgtattcgtgctcgccgaaggccatgagcttggctgtgctagtatcccacgaagccctggaatcggagtctataaagcgagtgacatgtcagtgggtatcttcaagaagctagaatcggttccaacagcggcagccgaactcactggatccatcctgaactccctcgatcttgatcgggatcagcattacattatacttgagtttcgcctcaagcagcaactggctgacgcggtcaaactcatcctcgacaatgaggtcccactcctctgggtaaaacaagacacgttccgccctactgccgagtctgtgcaaagcctcgaagaccatcaggcaattgcacatgtagacctcattggttgcatactgagtataggcaaagcgcgaccagtcgacttcgtcgtagtggatatgtggtaggggcagcggcggggggcgttcacgccgttgccacagaataaacaggacgatcagggcgactgtggcccatgttcggacgcgtcgtagctggcgcttggctatggagagacagggttcatcggggatatcgaagaagtcatcctccgaggcattggagctccgtcgataggggagggcgtaatttttgggcggcattgttagaggctgaagctattgacagcgcagtggtgatttggatagatgcacgtgatggttatgtaatcgttattgtgaatgcattctgatgctaaattggatttgatatcgaaggctgagaccagcttgcaggcttgagattgaacattcaaagttgcggggagggcccacctcttttcaaagttggagcaaccgtggaagatcgcatgccttccaaggttgtatatactactctgtacaaactattttctattttctccatctgtccaggcatgacatacaaccacttcgtatacattactggtggtgatgagatcctcaatcgttggtagcatggagtaacagttccagtttataaccttctagtcgggtgtttgcctacgatggtactcgaacgaatttctttattctaatcatattaaccagcagcttggagtgacggagaaaaaggtccattggtgataactcgaaaaaaagcgaagtcaccgcgatttccgcaaaaagacaaaaatagtttccctgggaatcgaacccagaacctttccggaacatttgcgaatcgcatttgttaacggaaaatcataaccgctagaccaggaaactgctcgaccacttgggccaattgatgaatgggcaggcgaaaaatggcattatgtctaatctttgaggtataacgtacgaacagtatatttttgtctctaatctcatgtatatcggtcgcattttaatttcatttctcctactgtgcctattctctgtcagtttcagtcactatataacccagcttaattggggactgccatatacaccgagttagttgttcattgagcaacttgtatggtagtccacgctagatatatatagaacgcataaataaagcagctgccacattcaactctccgctctttctcgtttgccactaaggagggacgtagtaggagaaaataattataatccaagtgcttattatataccagagatctatataccgtaaatcaatgaaatcccccaaaatgagattcacccccattaggcaacaacctcgtcccacccgaagagatcgacctcccatcatcaacttgaacaacaatatctgtcttaatagtaacacatccatcatcatgatggtccggcatctccgccttcgaaatctgactgacagagcgctcatgcccatgtccattccagtgatcctcctcatccttaatataagtattggtcatattagtcactgtagccgaatccagccactggtcctgaacattaacgcggcgcttcatctctgtgtctggctcattatgtgcggttgaccgagagcgagaccagtagccgtgataccggccctcgcgtctgtggtcaatgaaggaccggaggaagaggcgggctactggggcacaggaggcgaggaggatgctgtagttctcaatcctgggagtgttggttaataatactgggattgggagatggtagttgtacttactttacccagagaacgaacgtcacgatattataggtgaagtcttgtctgtcaccaagcgatttgagtttctagtgaatgatattagcgctgctgtgtaagtcgagaaaagatattatactcacataggtctttacaatagaagcacagccagagagcaagagtggtccactgagcgtgatggtctgccagatccggcgggatcgaacggtgccattaattttgcggaattgagaccagaatgaggtgtttggattacggtggagggttcgcaggaagaattgccagagttcgactgcagcaagcacggcaaggaagaaatcgatcacggtgttgaatcctgtgcgaattgcaattagctttgagctgagctgctgaagtatataattttccatacctccttgtacaaagcctacagtcgtttggacaaccggtgattggcacttgacggaaccatcttcagggagtggtgtccacatatagtgaaagtattgtactcgatcagtctgctctgagattagaatggaccaagcactaagaaggaggatactaaccgtttgatacgggttcggtccgcactggacaataatctggacgattgtaaccatattgacgacaacctgaacaacggcgcagacgataatagattgtcgaatcttcttgtcgctggctgcaaagcaagtcaaaagaaaccacatcatgcctgcgcgtgacaccattgccgaagtgacagccatcggctgtgaaagaaagtcccatttcatagcataaagacgctcttccccagttaagtagaagaaatgtctcccaaggcccgagttggcactagacagagttaatggctgacctgggaggaatgacactagtcgacctcacctcatttgaataagtaccatatgagtgatatcaaaaccccaagccacgaggaagaataagtcctctgtaccccaaattcgaccaggtgcagtgacctgcggtaaagcccaacgcacccagatcttgatagcatagcggaacaacaatgctacgccgacaatggatgtgaggacctgctcgaggattagtatacatatatccagaggcaatttataagatcaagatcatacccagcaagcctgaaatgtgccggttcctgttaaacatgtcaatccacgatcctctaggtccatttgcttggcatttgccaggtaaacataccgatatcaacatcgccctcactaggtttcggaatatccataatgaagataaaacacaataaccagacctctcggttataggcagggatccaattcaaatactcattggcatatatacgagacgagaacgatgcgcggggtcggtcagatggatcaaatgcgaaagaatataaaccaaatccaatccagcaccaagggatagtagaggagagcttttaagttgcctttaaaggttattagaaatggagatcctgtcaaaagtctcgcgcgaaccggtttacaggtcagaaacttgtctagactcgtttccaacgggtggaagggcgcataaacgtaaaatgatcgagaggaaacaagggatgcagggcaaatcccttgatttacaatgaaaatataatcgggtcaagcgaagcgagttgtatgatatggcagagtattgaaccttgatgtacggggtcagaaacgtccagttttgacttatgacaggagttaagctcgtgtggccaatctgcgtgtcagaaaatatcccatccttttgatcgtggcaatggacacttcgcattgccaggaccatgtggatcaagcacaggcgacattccggagagggatggaaatcatgcaatggccatgtgagatgcagtaagggatgtgacggagaatgagaaaaagaaatacatcaaatacacatccacatgggattgatggattcgatacacccctagatcggatctgcaaagatctgctgagttcgagagataaaaactatatgcacgtaagcgaaactattgattgaagggatgtgatgagtatacatcaagaaatgatatatcatattgacaaagaacgattaacaatgaactagtatcaacaaccaaccattaaccaattgaattaaccagtgaattatatcgctcaaccctgaactaccgatccgccctcctcatctccaccaatgactcgccagccctaacataaacctcaaaagtcacctctagcccacacaaccccgccacctgcctccactccaccgaactcctttctcgccccccatacatcgcaatcatactcgcatgaagcgcagtataagtcaaattcttggcgtactcaataatcaaaactcgcgaaccaggtgtcatagcacgcgaaatcttctgcagcaacgctacagcatccaaatcaggcaaattatgcaagatatgttgcagcgcgtaaacacacgcaccccgaacgggctgctcagcctcatttttgtaattccactccataagacgcacaccaggcacatcatcgatatccgcattgaactcctgcacgattagatcatccacaccgagatgcggatatacggcctgaacctcaaggaggagttcgccacgaccgccgccgatgtcgaccatagtagcggagccagcgagggtgccagtggtagtgtcacctgccaaagcaccatctagatcatagcccatcgatttgacgcgctcggggaatgttccgaacttcaggaacttgccgaccatgaaatggttgaaactatccatgcgaccctgagcctccataattgagtacgtgtgctgctttgccagctcagactgacccattagctgataggcgtattgcaaggggccgtctgcttcagcaaaagggtatgcgaattgggtgtctcggagctttttcatcaaaaatgcgccggccattagaccctcggtggtgctggatggggttagtgcgtgcttggctggttatattgatctcattatagaaacaggacatgcatgggggaactgacaagtgcagtgcgccatgctgggcggaaggcatggcgaccatgtggtttgtgatggcatttgctgtgaagcagtcctcggccacgcgttcaactaggccgagtccggccataatgtagagtgtgtccgctgcaggaatgcattagcatatcattgggatactgcttgtacctatacctgtacaagggtgtgcttacaggctaatctggtacctatatccattgtcagcataacatctacaacagccatgataacaagccattatccattcaaactggaacacgtactcagctcgggttcatctccccctcgggctttgatgcgtgcattgcaggtagccgagacttcgtcggccgtcgcaggtcccccgtgacccacgaggatattgaagagatcaaagtgaatcgcgaccgggacaaatcccaacgatgcaggctgtaactgaattagatagaagaattatctgacagattcatcagactcactactgtgacggttgctgcgagtgcggcgcctgggggtgcaacgggggccgaagatgacaagcccagtaggctggccaagcgggtgaggaaggacattgcgttcgtgaagatttttgagtatgagaatgacgggggaagtatattctgattatactctaaatacatcatctacaagtacaacatacggtgggatccggcagcaattccgatactagggtgagaatacaaacggtgtatatattcaatttaccatgcctggaatactacagattataacacatcaactcctgattcgttattatcatgggattgttgcgctccgtggaagatcattggttcaatgtgaccaagttgggtatgcgcaagggataccacaccaatactccgtaggaacaaagaactaaagcctagaaaataaacccgcgaataggaatgtccaatagcgaattaccctaaggcgaaggatctactagccccgatctagctttatgatacatccactacacgtacggagtacattccggagacttttcaacatatccaaatctgaaaccgattagggttcccctctgatgtctctgaattgataaagactagattctagaatctccctgtgcaaaaaaagccacgcgagaatctccatgtgtattcgaaaaacccgccgtgcataaaacctacggtgtcccgtcacgcagaaaagaaaaagatcttcatttacctccttacctgaccaaagtacgttgtcttggggttgagcttttacactgcacagaatacaggcaccaagaagtgcgagcatacctaccatggagaaaccctcccctgtttactttacgcaggagatggcagctagtgcgtcgtcgtcgcttgagacacatgaactggaggaatgcgatttcgattcggacctcgaggtcaaggatcccttgaacccgagaaattggtcatcggcgcggaagaccatgctctttgtgtcgctgatgacgagctcgttgttggcagatgggtaagtatacccggtcgattgtgaaacccatcgcggctaccggctgagatgtgtatgcataataactttctgactaaatcttgcagggctatggtatggggtggaaccctggtcacggagcaggccatggattggaatattaccatcgctcattcggcgactagtatgaattatggcatcctgctgcaggggtttggcggaatttttgctgttccgctcattgaggcgtatgggcggtgagttgggtctttttcgcccacgttggctgtcacactgacagctgaatgtagtttgccgatctggctgtggcctcaggtgatcactatgtttatggtgctgggtgccaccctctccaatgattggtctaccttcacgaccttccgctctttgcagggtctatttggcacagtgcctcaggtaattgggctcccgatcattcatgatatgtatacctcggctggtaagtattttctgtgggattgtctcgagtaccttatgctgatctgacaacagaatggccgcggatgatcaatatttggtaggagacttgccactcaaatttagggtagcactgacttgagcataggggcaccgccttcctcgtcgggccattccttggtcctgcgatagctggatacattggtgccgggtcagactggcgtatttccttcggggtcctgacagccatctatggcctgtccactgtcatggtgattctcttcggctatgagacatatcacaagcctggacgaatgaacaatcagtcacgactcgcgtcttattttggcattggaaataccctgcttcccaaggtatcgacgttgatatattggagccgaacagtcgtggtctatgtgttcaagttcccgttgctgatgactggtgcgtatggtcgacctagcttgctatgacattcactaaccaagcctttgtcgataggaatcgctatcttggtaacattcacttggccgattggtaagtaaccaccatcacaccgttctttcacctgctgactgtgcaggaatcacaaccaccatcgatagcttcctgcacagccctccatatttgtttgacacgatcgaggcatcatcaatgcgattcgccggtgtgattggagctttatgtggtatgcatcttcaaagcacctctctctctctctctctctccggattcttaccatctcacaggctgggcatttggccacttcttcaacggctggatcttcaagcgtcatagctcaaactggcgaaccgagctccgcctccacggtgtctggttcccgataggtagtatggcaagcggtctcctcacctacggactaaccatgcactttggcaagcactggattgggatagccattgggtggatcatggtgaacatcggcatggtagccacggttgtgtaagttccaaatccactctcctgagtactgtcgtatgtctaacatccattgctcagtgccatctcggcctatacattggaaaaatacccggagcaggcgacctgtgtctcggccattctgaatatgtggcgcacctgcggcgggttcgcagtgggatacttccaacctgcatggattcagcgcgatggcctcggactggtctttggcattcaggctgctattctgtgtgtggctgttgctttgactatcactcctgtgttgttgtgggagcggaaaaggcggctgcgagttgatgctgaagctgatccttgaattctaatggtgtaaataactgtatatgtgtgatgataggattgcatttggaatattttgtatttatttttgctcagacaatagaatacgagttgtgcaataaggatagttgatcaagagggacctcgcgtccaaccctgaaacacacgtgactggtgcctaatccatcaggccacaatcccgttgccgacccgaacacgtccgtgccgtgtccgtcgacgccagtttcatgcttaatctattcaacgccatggctggctgctgtactccctactacagattaattgacatcaatctcaaacttgagacatgatttacccctgatcttcagctcctgaatctttcccactaaccaacactcctactctgtacggggtatacacagtcgatcattgcctcgctatgcaaagtcccgcaagcgatgacgcttcccgtggggcagcggtctgaaagacgccaccgtttatttggcttatgtgccgcgtggttgctgatcagtccccaatgaacctgttgcttggcctatcaaagatccctcgttcacctcgttcagaggttcaaccatttctgcctgcctatggattatccactgttgccgaggcagtgtcaaactcgtttgactcagggactcagggacagcgatccctgaccctttttttcccttccgtgctgtgaaacatttgttacaaccttttctgtcttttcccaccttattctcgttagctaaatgacatcggttcctatttaatctttagattgtccttgagcaccaacccgactatgtctagttctccgcgacgatggctcttcgtggtctttccgatccttatattctgcatcatatactacctctttcgattgcctgaatccaacccgacaatcgtgaacaacccagaacaaattcctcaagcgggaggagaaacaattgtggtaggggaggggacaagtcctcctctaatttcccctcctaaagaggagacagtggaggagaaatgtggccatttactacacgcactcgacgatgtcatggtcatcatcaaaaccggtgcgaccgaatcccttgaaaaggtccccatccacctccgcaccacgctgaaatgcgtcccgcactttgccatattctccgactacgaagaaactatcgatggtgtccgcacgtatgacgtcctccgcaacatcagcgaggcaacaatgaataatgaacccgaattcggcatctaccgccgtcttcaagaggtcggacgtgaaggcttgacggacgcagaatggggcgacgacacaaacggcccactaggcaaggtcaataacccaggatggaagctcgataaatggaagttcctcccaatgatcgacaatgcactagaagtcatgcccgatgccaagtggtacgtcttcctcgaagccgacacctacatggtgtggccgaacctgatcggctggctggcacacctcaacccagatcgacattactacctaggaagccccatgcaaatcggcgaaacactcttcggctacggcggggcgggcattgtcctctcacgctggacgatgagcctcctgcacgaataccagatgcgggcaaaggaagatctcgaagcgatgacggcacacgagtgggctggcgactgcgcgctggcgcgagcgctccacgacgtgcacgtcgatctggtttgggcctggccgatgatgatgacgtcacggccgtgggaaatcgaccatttctccgagggatacgggcggcaaccgtggtgttaccctgctatctcataccaccacatggcgcccaaggatatcgagaagatgtgggagtttgaccaggcgttctttgctagtgggaagaacgcgctcatgctgcatgcagacgtttaccagaaacttgtctacgatgggacttgctcggcgcgcgacgattgggacaacctctcagggatcaagattgattttgcagctggcacgattcctacgttggatgcttgtgcagaggtctgtgggcacaacaacgactgcttacagtattcgtttaatcacgccgagggtgtttgtaaacacgcgtctactacctttgcgggtgttgctaccaatggcacgcagtctggttggattacacctcgtgtgaacaaactcctcaaggcattccagtcttcatgcaatgaggtgcaatatgtattggattgatttttctttcgttcctcgggcattttatttttcgttgtctgtacattatcaacttccttttctttccccctcttcctactcgaccatcaattctcacatcagaggacaaggtgatcccatgctttcaaaaaaagtccttggcgaggcgttttgctatggcgctatattggcattgtctgccggtcagatgaagacttatttttggtcgctggaaccgttttccgtttcattctttgttttcattacatacatttactgatcgtttctagtgataccaatttttccatcatatcaaatcaatttaaagactcatttacaggtgcggggttggagatgctgtaatctggatgaaactccgatacaccgtagagtgtccgagttatatgactatcctaagtgataagctatgattcattgaagttggttcactcaacatgtctttgaaatttacggtacttgaagcttacaatgaccatataacagcaccgtccttgataaaagtaaatgatttctcaattcttttctctaaatcttctgagtattttcctgaacttagctaggttatgagattttcagaattattagatccccatggacagtcaagaaatcgtcacggtctttccaccggatgtggtgatttaggcaggcaactgaatgccgtacggtatatcgaggattctaggtaagaaagtacaagatatgtgtataaaacgcagagtgatagtcacctgacatttttgccctatctctctctttgacgtcaaacaaagaagtaaatccaaatgtggcctggcctatttcagcttgagtgaagttcgctgacagattaagagtgtaggttccgataagacctaatcagcactgtagtatgtgttggaatatccaacttcacgccatactgatgatcacgagcaacaggcacaagactcgagttcagtgtctctagttatattgattgaagcatcaatatgtgaattgaagatgcggcagatgcgggtggataattgtgaccagaccaggtggaaggagtcagctgtggttgttttgtttttgtttctcaactttgtgaagccactcaggctgttgtgacaattaccatgaccatgaaaatttttagtggagagatttgcggctgtatgtatggttgtgacccggcaaggattgtggaattgtcgtcaatcaataacttccaaaagaaaaatccaggttgcggatcttggttatcgcagttggtgcagatatgtctgcagttgccagcttctgggggaatgtttgagcatagagagttgaaagtgtggaaagtgaagtgggaggtgggaaaaatgagaagatgggggaaattctgggggatgagtcaagatcgttcatgacagctggcgaaaagctgccgaccgggtctctttgcgaggtcacgcctggttgttggtctgcctcgaagcaacttatagtgagtagcatttaaactaccggccggagtgcttccactgcaagcctgtcgaccagaaccgtttctggctgctgaattgttttgagatgaggtgagggaatgggggataggaaggggagatatgagggttcctagaaacgagtcagtaagttaatctttatacaatgaaggaataaataccataagaaatggttatagggaaacatgtcatggaaggtccatggaggcaggttcataagaagtaggtcttggaggatgtgataaagacgaaggaaggagggatgtgtaggagaaagaaaaaaagaagagacaggaatgggcaaaggggggtatttataccctgtagcttaaggacctagagaaactcgggttggtgacgatatttgactaaaagggaaggacccccagggctgggtcgtgccttccttccatcttcgcgaatcacctgacaccagctctttggaacgcagggaataaaacccataggattatctggagatacacagctatataataactaaagatgaagctattcctggattgcacatagatctatgtaccaatatagacatatagacagggacaggctttgatttgtatcgtatatagttgagccctagtctagatctgaccgatttattcacacagacatactaaggacaccatcataagagcagcttagctcaacgccgctctccggattgtccacacacgaccactgcgtaccggagctcagtaagacatgaccgttctcagcaatcgggcctgagaccctctcaagtcccagtgtaaacagattgaagtcaacggcaccatcggggaagtgtatgtaatattgactgttgttgcatcgggcattttcctttggcgaagatccgtatgacctggcatcaaacggtatcagttagcgtctgccattgtcaatagatcttgatgacaaattagactcaccaaatcaggttgcagtcggttggggtgtcgtcggggtagtttggatcagtcaggctgaaatgcattgtagcagaggagccggcgcttgctctggcccagaagtcactgatctggatagagctgtctcgctcgatgatggggaaggcgatggcgccggcaaccaaaagaggggagacaacagtgatcttcataatgaattgatagaaagatgtctgatatactatgagatatgaatattaaatgaaagagatactgtgggagaacgaattatttatatatctctagatggcctgaagtatacaaatctgaccgaaacactgcagcataaatgaaactaaaccaaacctatgcaagtctatgaaagtcgctggttggtcgaattgtagaccgccaccaccaatactcgtgggtaagcaagacaaatgtaacatgatgcagcattaatacgagcaggtagggccaattagctgtagcttacatgcagtgttatccatatataagtaagaaacaatacacatcaaactggtgtacatatcacatagtatgtacattgtatgtagatagtcgtactagtttcggggtgaactgtacaaagtaataatcataagtttccaaggtaccctcaatgcaataatttccgtagttgtaggccgacatatttttcgcagggtcactggacgattctgtctcaagtaagaaagtctcaagaaacttctaccaaaaatggaacctagatcgaaaaagcaaatacattcaactgtttacagtgtcttatgcccatgcctcgctttaaggcctcccaatatcttggcgacgatcattgctgtctacagattttgtcttaaacccgggggattcatgtcagacaataaagacatggcgaatgatagtgctttgttgaccgaaaatctcttcatattagtgattaagcacggtaaccagaaaacgtgcctttatcaaaggccatattgaatccgtaagggtctataaacttccctgggacacatcagaacacccgtgattcaagcaaagccaataaaagccattcttatagcagaagtttcatcgcgaatgaacctggatgagtatatccatctaatatttcctgcacaaagtgaaaagtgccctctcctggacgatccacttacgccaagtccaaataccaaacaaccctgcagatctctcctacttagagtctgtcttggcttcatttaaccgaagctgcggtcgatcggagaattaattggcagtgggaggaaattctatattgtagtgaacgtgtaaattccgatctactggacaggcggcagcacaatttctagcggtttatatgagatatgtgaatatcttagaattcctattgatgaaagcacgttctccaagaccaaggccaataccaagactttgattacctcggaaattcgcgcgattgccgatgcaatgaggtcaacggttacctcgccgatctggaatcccttcactcacaatccttgccacattccggtatgccatgacagaaatactgccttcgcatggacatgactttgaaagcgtagcttcccacctcaagcagggtacctcatggaagttgagactggcgtccgatattgccgtccttccaaggttagctgaaccactctcggactacgggaggcgcatgggacgaaaccttactgtgacgctaaagaacccaaattcctagctgattggacgatgaggatgcggatttttatcagatgatctgataggaggtgattgattggaatttttggacattgcttggccagctaaaccggaaatttccacgatataatatgctcaactgtcttcctccggtggtgccgaccctttgcatacaacttttcatccgccagcgaattgtgaggacccctcgattgtctattctgttacaatggaaaagacaatcatttccgatcaggtcacaccggccagtactagccatgatgctgagagaatagcggaactcagagtccaccagaacatggatgatttacctgacgacaaggcaagtctttctggtcgagactcgaacgagttccagggtggcgtgcaacgagtaagagcgattacatcggcatggtcgaccaagacgctcattctcatgttcattctgtaagtctggatctcaataaacagaaagtaaactaatatcccgccgaaacacaggctctaccttgtgtctttcgtagatgcactactaagctcagtcgaaaccgcactgaacccctacataacatcctcattccacaaacacggcctcttgacagtcgtcagcgtcgtttcaaccatcctgggcggttcatccaagttaacactagccaagatcatcgacatatggggccgcgtggagggattcctaattatgctagttctcgttacgatcggtctaatcatgaaggctacgtgcaagagtatggaaatgtacaccgcagcacacactctatactgggtaggccacatcggcctgacctacgttgtggaaatcatgctggcggacatgacctcactcaagaaccggatggtcatgatcggcctgaacggtacacccggtatcgctagtacctttgcaggcccggagattgccacactcttctacaccaacctcgacttccattgggcatttggttcgtttgctattatgcaggttggggtttgtatacctgtcgctgcggtgatgctgtttatgcaacgtcgggctgaaaagagcggtactcttgagaagactcgttctggacgttcctggtggcagtcaattgcgcattatctcatcgagtttgatggtacgtatttccatatatgcaggtctttttgaatttgacatgtgactaaagagctgttttacccagttgtcgggatcatcttgatcacagccgcattctctttaatcctgatcccgttcagcatcgcctcctacggccctaaggggtgggcgagcggatacatcatcgcgatggaggtcctcggtgtagcgtgcgtgcccgcattctacatctgggaacgatactgttcaccggtgcaattcctcccgtggaagtatctgaaagaaccaacaatgattggttcgtgcatgctgtacggcgtgatgttcgtctcctgcttgtgagtgccagtctcttccaacgcttagaatcaaaggcacagcctaacgcttgcaaaacagtacatggaacagctacttcggctcatacctacaagtcgtcaacagactcgacatcacaacagccaactacgtgctcaacgctttctctctgacctctttcatcttcagccccatcttcggcctgtaagcacacctcaccaccccacacatacctctgtacaaagtctaacaaactttcttcgcttctcagaataataagctggaccggcgacttcaaatggaccgccatggctggcgtaccaatcttctgcctaggaacagctctgctagtcccgttccgcgcgccagacacacacgtggggctactaacaatgatccaaatcctcgtgggactcggcagctgtctgttcactgtgtgcggacagatagcgataatggcgatggtaacgcaccaagagatcgcagttgtaatggcgatctggggattatttgggtcgattggagcggcggtgggatctgccatcgcaggcgggatgtggaataatatcctcgagaaagagttgtataaccggctgccgcaggagagcaagcacctttcgaagagtatctttgccagtttggtgacgcagatttcgtacgcggatgggacgaaggagcgcgatgctattgttggggcttatgctgatgttcagaggaagatggcgattgttggggtttgttttgtgccgctttgtattctttgtacttggttttggaggaatgtcaatgttaagaagttggaaaaggagcagacggctgggaatgtgtggtagggaagggttcttgggaattggaaatggacagagcttggatggtttgaatagagatagaatagcaaggtacgtggagtatgtacgcaggagtagaaaatatcgacgttatgacttgagcgttgacttgtgatattctggataaaatattttatttgtagtgtggcttcaaccactacacttgtgcagatgcgctggacttcggagtatcctatagcgcgggtgtatgtacatagtttgatggcattcagcctctcgcaaggcggggcgaatgagagtattcttcctgttcgatggtgagagtatgagccgccgagatgaatctcacgggtgatttgatactaaacattggacttgggttgtgatggtggctattatgtggccaaaatatatacccgtggcccatttagattaagacggcaaatttgcctagaagcacggtggcatctatagacagcccaggaggctaggggatggccaagacaatggatgccctttcaagatggggtagaccaaagtaacatggtctctaaaagctagcgagcgaaatcatgccgatatctctcagccggccatagactcctcggggacctcctggaacgtctctgggaagaacccaggtggcggccagatatccgctatagaaggtgggtgcaccagtggttgtgatccgcccaagcgatctgggtcatgacagaaagcctggaacgtgctctcgtccaagaagccgaaatccttcagaccagcctcgcggttcgtggaccattcagtggtatccaggtacgcgaggtctttgaagatagcatcgatgtcgccgacggaagtgacgtttccaggcatcattgggtttgagcttgtcgagtcgggagtttgtggttgtggttgttgctgatgttgcgcgctacctgtgccatacacggaatctgccctgctgcgtggtgtgatcttgtccggtaggactgactgtacttcccttgggtggtgtagtgaaacatccatcatgcctagatccgtgttttccattactgtgtcttttggggtcaaggattgcccgtcgactggcatactgatgccaagaatagaagagttgtaatctccttcgccgttttggggtaggctgcgagctctacctagggattggatggagcctgccatgggtgcacccgaaaatggaaggccgactggccctgggaaattggatggtccgccaatagcatcctttgggtgctgccacctctccatggcggaaaccaaagatccatatgctggccatgtggaggttaaagctgccgttttgtgtcggaactcgtctgcccacctggcaaaggggaaagtgtccgatgagtcggcagtagtccgaagtcttaacgtttgctcggcaattgtgcgaagacttagctcaaacagcggtggacaaccgcaaatagagaagttctccaagtgttgggtgagcatagagagccctcggtagagaagcttcttggccccctctgtggctggacgctgtgaacggtgcaacccttgctcacccggaatcaattgcagatagagccaaagcagggtggcaacataggttagccctaggtaactctgatggggaagcagggctgaatgccgttctggatatatgctttctggtccaatcagacggcatcccagaggtaggcagtcatcccactgcttaagctccatgaccaactgatgcgcaaaggtggccatattgtatcccgaagacatatggcgagagatcttattgagaacgctcgccaactcaaccaagcggttaaagcagctcaaggccaagagtggtccccggcgcggcgggttcttgctcccctgtggagcacccgtgggtggtaaaacgtccacccaggagttccactcctccaatccatcctcttccaaaaggcccaccgtagtaaggtcgcttggaggcatggctgggctccgtgaaaggcggaaagagagcaatgaatcaaccacaaagcatcctaagaagaccgccttaccttgtctaagctcatcagaccgccggctgtcggacacatatccaacacccatggcaaccgccatgcgcacggcttgtccgctcaacagccaagccgcggtccaatcctcgagacccatgttaaccaaggtcagcagcagcaatgcctggatatggccgggttcataacgctctttctccatggggatgagattccgcgagacggcatagtattccttcgccagggcaactgttccagcggggccggcccgtgaatttgttcgcgattgggtgatagtgtaactcatgatagcccacagggcggcatgatcgccagacccaggtgaagctgtggcaatagagaaaggggcattggcataaaggtaggaagcgcgaagaatattatgcttggtcaccacgggaaaccatgaatgcgtgaccgcaaagtaaatatcgagcagctgcgacgtctgaggcggcaactgcagcgtatggggactgggtccagcgacaccccgaccattcgaatcttcggatagtcgagcccgcttgacacccggcgatacggcaaagggctcaactacacgcggggcacccggaccgagcggggtggaagtgcgagctactcgatacccccattgaccgtcggcgtcatcatcttgcggattacgcgatctcttcccagtcgtcggtcccggcgtatcagaattagagagcattttctccagggcgccgaacagccggctcgttttccaagattcgtgtagactttccgaagcactatcatccgaccacacggacatcaatttctcgcgacgaccggcggactcggcagtgtttcctagcatggccagcatggtatcctcgaatccctcaatgttacagatcgacagcgcccacagcttttccaagccacggacgtaaccctcggggagaccgcgtttcttcgcatgggggtcgtaggagcaggactggcccgatacctgacaggcggaacaagtgggacgaatgccgtcacatttatcctagggtcgccgggatgttagactgagcaaatgagatatccgagaaaaggacatggcgggacgcgactcactttcttactgcgacagcgatcgcaagctcgggagaccctcttgcgccgaggggccttatctgatccctcatccatgaagaggggttattagcgcagaggacacgccatgtagagtggaataaagggaacagcgagctctaggtcaattccgagttcactgaatcgcagaataaatttgcaagtaatgccaaggtcggaccgtataagaagcaggccgagactcggaacggggtcgaagatgagtgcaactgcgaatataaagtggaggagcagactctaatcaaaccaccatgtaactatggagtagttagcctccacgacaaaggacacagataggcaggccgagggaggactctcggacgtgaagttcggggtgtgaaggtactcggaattatcgggggatctccaacgaccccacaaatttcccacatactccgaacattgacttgctacatcgtatatagccgatttatagattgagagagcatacctgtaagtagacatgactacaccatttacactgatcagacaaggcaccaaggcaccaaggtatcaaggcatcaaggcaggcattccggatgtacacccgaccaaagccgacgacgcttaacccgattaggactttatatgcggcgtaaagaggctgtagagtgagcattagtttctcaaagatcaacctggagactgggctcaacactaaccctatatcggcatcgatatgcactgtgacttgtgtaagagatcctacgggatcgacattagcgcggttatgttgatgcagtttgatatttcatcgtcaatttctgcctacaacttgcagtatatcgtattgtatgaacggatttcgatataggctgcatttagtcgcttcaagctggctgaattagaagatttcgttggttcttttacagatggaagagaaaacatagcctcctttccagctataagtttacaatttattctctggcacgattctatggttccaattagttttcgaaaggaaaaatgtaagttctttctatcctatgtgactgaacttctttgccactacagactcgggaggagggcgagctcgtataaagtagtataaagctcgctcttatagacttgggaatctataaaccgtacggagcatgcataaaaagattatcgtgccacgaactaggctgtcccaaccccaggccaaggttttattctcaagaactacggattctcgcaccatagcattgggtatggccgacacataccaaccgcccggcatgcaagcttgctttttctacgtgtctccttgctatcatgcattataaaccatgttgcctatggagcagaatactacaaaattcaaccattctaccccaaagaagaaaagccagcgcttccaagtatgatttattggaccagggagatgaactatgaacaaatatgggcataattcccaatttccacaattacaatcctagtacggagtactacgtatgtgtgcctttacgggtcggtccgtttcgtatacgtcgtgtacttctgtcagtgcgatttgagataggcggctacatgagggggaagtcttactctcagtcttactccgttgatctatactccctacgtccatcaacatcacgagcgccggacggagcacgatgtcgcaaaataagcaaaaagtatgccaaattcccagaatcaccacaggaagttactttgggacaaaatgatgccaaagtgtccgcaccgaactaatttagatatgcatcatgtaagaaatcaatcttttagtgatatgtaaattcttttgattatagggactgcaggccgaaggtactggctcccgtctctgcgaaagtacgccgccactactccgtgcatgggggtgctttatttgcaagaatctcaatacacttcattggcgcgatgtatacgctttccgaaagtagtcttcttgatatgtacactgatggtttcgtcttgctctctcaactggggactgtgtgtatcgccgcccctggcacctgctataccatgaacacagaggtaatcatgcgctggcacattgcgcatggtggcttggctggctctcttcgacccgtcgctatttgaattgattagttggtcgtggcaggaatcgtggcattatcacctggaatcaattcagaagccggctgacttgaagcaatggacgaactctatctatcggtacagtcgacaactttaatatatagcaattgagtaaagacatagtccatgatcagtctcagtctatttcttatccttcctcgctaaactgcctctgggccgggctctggcatatcccataatgagcaataagcgtcaggtcttcgtttcgcttcatcatcgcgactctccttctctcggcgggaataggcaacgacttggctatgcagcctaccattgggggattctcatttctcccaaaaattccaaaggactagactgctatgctttcgacgttagcgatggacttatcctcgatcctgtaaataggcttaattgcaatgagagatccaattggcactttcgagagaaagtaaacgttgatccaacccagggtgaccaccttattggaatggttatggttggaaaggtgcctcatgaggctatcgatgcgcaaatctacggtcttcttaaagcaattccacttccccaaaagggttcacggccggagcaaaactgcgttacttggacgaaagccgtaatttacacgctccgagagaatggttttgtggagatattcgatatcgatcggtttatggacaagacgctcgcattcgcggatcaacgcatacaccgcacaaaatctacacccaatagaatcaactacaccagtcggagtatgtgactcgtgaaacgcctcatatggagggaaagctatgacacttactatggaagggtggacggactaagaaagaagaggagagaagaagagtgaggaggggaaacgggaggagagggagaggaagggaacgaatcatgttatatgagtgaaagccttaggcgttcgaataagatctcattgcgagaccgatgctgtcacgcaagccctgaatcagatgctctctccctcgccagaacatttgtggatcatccaatagcctccaaagaactcgttccgcttcaagctcgtcgtcatatctcttctctaaagcacttgccaatccactataccattctggctgagctatcgcgccgtagtttgccttggtatactcccaatattccgggtaccagccgccaaattgccaatcaacgatcgcagagaccttgccattatgcatcataatattccgaggagcgaggtctgcatgggtaaagcaacttcgatagcgacgggagtggcattctgcgatctctgggcctaattcatccagagggatatccgctcgaatgtatgggtggaatgcttcgtggctcacaaatggtccgaaaccccaacttccgactcggtgatcaacgttctcaccgaaatttgtggatgcaactattccttctcgcggaggttccagtttccgaagctggctaacatatcccgcaacctggttggtaatgtacttcttctggtcttgcgatagttcggcgcggttccatgctatatcgagactcgttccacggataaactccatttcaatatagaaccaataatcgtagtagtgggtgttgaatactttagggacaggaattgatgtgtgctgagcgacgtatttcatggcttctagctccgatataggacaaggctctttaatcattctgccagggctgactcggactccacgtggtccaagtttatctgctccaaagattttcttgccaatccatagtcgaagtggaagaagataagaggttgggtgctttttcttattcgccatggctggcttggctcggtagatggtttcccttgtattattgatagggtgaaaagaaagaaatgtgaatcgaagagtcggttgaatccacgtttcactgtagtgcttgggcttataactagtaatttggcccaagctattgtagctcttcattctatatacaatgttagaatggttccaactagtcaatcaggcacactatctcattattacccaaaacagtggaggagtacgctatccaggatatagaatcaatcgtctatgtccttgcaaatacggggggcgatgcggtctgatttgagaataaggtgtggttcaggggtacaggtaggaaggaggcgagcagactgtttacaggtgacaaagggtgggtcacatgactatcaacacgagcatcgagttgggatatcgaaggcgatgtgaaggtccatggagttctaaacatttatttcgtgtgatttcgtgtgatttggagacttcgatattggctatagcactagtataaacatttccccacaaacccacatctaaaagtaaagggatccataaagacttgtagtaactcatggtgagctcttcggaccagcttccagtagatgatcccgcgagagacatagatttgacatgagatgatgtgcagtcaactccactttgagatttgtatcttgcatctctccagaccgagatctggtggaaaagccttttgccggaaccaaattggccggcaacttcctaaattcctcattccggggaacatctaccaacttggaacatcacttggcatattgttcgactaacatacttagatcaagactattccagactgtattgtcctgtctgttgtccacatgagcatcccttctcatcccttctcaacatctcccgcattcgatctccgaatgcgattctatgccttctgatcatggcgctcgttcactcgacatagaccctaattgatctatcgcctctcaccatgctcgattctaaaccctcaatttcccccacggtcgacgccaagtccgacatccccgcatgtgccaccaaggaatcctcctctccaaccatgctccgcccctcgtccgcccctcgaacatttgctcccaatgcatccctcatcctgatcggcatccgcggatgcggcaagcgctcgctaggctttgtcgccgcgaccgcgctgaagcgacgcttcattaccgaagaccactacttccgagaggtcacaggcgtcacgcgacaggaatacctcaagcggtacggcagccaggagttccagcgacgtgacatcgaagtcctgaagatgatgctggataaccaccgcacgggctgcgtcgtggagtgtgggcttgccagtctgacgcgacctgtgcaggatcatctgcgtcgctatgcccggtccaacccagtggtgcatctgctgcgcgatatcgatcgcattcagcaattgctcggtttagaggaccaggcggtacggttgtttcgggagggggacccgatgcatcggatgtgttcgaatttcgaattctataatcttgaagatcgaacgcgtgcgtcggaggatgggagccccgatcgccggtctgcggattattcattcaaactgcaagaagtaaaagaggactttacgcggtttgtgcagtttattactggactcgatgtgaactattcaagctacgattcgccgttcgttctgctggagacgcccccagaactgcgctcctttacccatgctatcttcgtgcgatcttccgatctgatcgccgacaatgtcaacctgactgaacttgaatctggtggagatgccattgagctttgtgtcgatcgatggggcccagacatggcagccactatcagcaaacaggtctctgtcctgcgtcgaaatgcgcggacgcctgtgattctctccgttgacacctcatccatcggcgtccgctccccggagccagccacctcttcttctcgatcttactttgatattctcgcgcacggtctgcgcctgggtgtggaatatcttgttgtagacctaactcaagaccaatcccggctggctgggactatcataggtcgggggaataccaagatcatcggccagcaggtctttgaaccatcttcccccactacatgggacagtgcggactgcgtcgccatctacaacgaagctgaaaagctcggctgccagctcgtccgcctcctccgagttgcaacaaatcgcgaggacaatgccgctgtgactgagttcactaataaaatccgatcgctcccgggagatcacccaccgctcattgcctataacgttggtgccctagggcgcacctcacaagtgttcaactcaatcctcactgcagtaacacacccggcgatcacccagtctgcagattataagcacgacccgcaaataacctctcgcgacgcagtccgcgctctattccaaagttacgtgctcgacccgctcaagttctacatctacggggagaatgtcgcctacagtttatccccggcaatgcacaatgcggcacaccaacactgcggcatgggccacacctacagcatcccagagtcaccctctctcgcggtattagaccgactgggccgtgatccacactttgggggatccagcgtcgtgcagccatggcgcgtacaggtatatcaaaagctcacctcgaaaagccgacacgccgaagccatcggggcaatcaacacgatcatgccgctccgcggacacgcagacggaacaatgttcccacttcaggaacaagccagccgacgcaaccaagccgggcgcgtgctgggatggtacggtgaaaatactgactgggtcgggataatgacgtgcatacggcgacatctctccccgcgcaacgcgattagcgcaaaaacaacaggcctagtgattggcgcgggtggcatggcgcgggccgccatctatgccatgctccgacttgggtgtcggaagatcttcatatacaaccgcacgcaatcgcgtgccgaggaagtcgcgcgtcatttcaactcctgggcgtcgtcgcaagtcgactcggctgaggtagtttgtgtcttgaagtcgcttcaggaagactggcccgcgggcactgctcagcctagtctcgttgcgtcttgtgtgccggctgatccagaccgagatgaaccaccggcaaactttgagatgccaatgcagtggcttgggagtcctacggggggtgtgattctcgaggtgagcttttttcccccgggatattttgacttcttgtcacacgtactaattgcatatagttggcatataaacccctcgatacgccacttctacgacaaatgcgccgagtccggagcgagaccggacggccttgggtcttgtctgacggattagagaatgttaccgaacagggaattgctcagtttgagttgatgaccggtcgcaaggcacctcggcggcttatgacctatgaggttctacataattatgtgggtgatagtgggcgttttgacgagaagactattcaggctcgtctagatggtgttgggtctccggttactcagaaacaggaatagagtgtattttttatgactgtgatcgtttcttcttgacttctttcgtcagttttgtatatataaaacaatctcaaacagtttatagcagactcgactcgatataatctcaatcgcgtgcgctgataacactctcctatcagcacaccgcccggcccgagccctctttcttttgtttgggtctcgtcagcttcaaactcgactccccctgaggtttctttgtgttcctagccctctacaatatagtcaaattgacttgaatagggtatactaccatcaatgccagggttttcgcccgagcagaccgactcgataacggcaacatggaagaaacgcaagcgggaccatgaggagtcaaggactctagcacgtccgtaagtcttacaatgtatctcagtgaggtgaaaatatagattaacatgcttttcagaacaacatatgccccatcctaccgagttgattggcccgaatacgacggtagctgctcactgcctctatcacgacacccagaaggaacagacatatccttccgaccacgctgtctcccccgcaagcgccgacatatccaaggtccttatatagcactaccgtctcaccagttccagcctcaacaccaactccaacacccacatcaactccaacaccagcaatccccgacccacctctccccaaatgtctacagcaccccaaaccaagacccatactcacccccggtctcccccaaaaccctcgtccccttacactacccaactcaacaatccgcctctccctccgccctgcgcccctgccacatctgccaccgccgcccaacaacccgtcaagtcctcgacgcctatgcagactgtgatctctgccacgagcgcgcatgcttcatctgtctccggcaatgcgacagcacatcctgcggcggaacattcggtctagcagaagatccaggaatacacatgcacatgcgcacaagctcaaccgacgacgtcagctacggtgccagcgaggcgccgaggaggaaaatatgctccggctgtgcagtggaggaagtcaccgagaatggggcggagattgtacgctgtcttgactgcgtgcgtggtgcgggctcgtgggctccggtggctattccgtctgattgggatttggatgacatgcggcatgaggatatgactggatgagggttatatatggagttgatttacttgccttctaccgggggtattgaaagcggatatgacagaatgacagatgaaactatggcttaacattctttacaacctcagggttgttgctgctccttgggggtggctttttttcttcggagtttgatcctgggactggactggctgggattgaggcgggtttgtttttggcatttatattggacaaacagcatggcaaattaatgatttttattgctctatattgtagcaaatagcataatgacatcggcctttatatacccaactctatttattgacagactatacatactactcttggtttacatcgaaaggtagaaaccaagccaaacctaagtaaaaagccaacgcttatattcctgtccaggtaggaggtaactgagcgggcaatgcctcagtcatggcttgtaggcatatttcctgccattagtagtaaggcaagtaggtacttacgatttgtatgtaaaccactaataaaatcaagtcttttttgtcatagcattattaactgctttatcgtcaactactttagcaactactagccggacaattcgggggaaaaatagggtttcggcacatcagccttgtggggtgccctagtccaggtccaggcgtgaactttcgtctttctctcttctcactgcatgattgtctgttctacgattctacagatcggcgactatctggtatttgcatgtttgtaacttgctccttctttctctcattcctcatattattttgaatagaatacactctgcttcctttgcaagatctggcacatcacaacactttcctctcatcttacatctcatagcactatcacttggctggtcacagcattaccctctctactatgatctgcgaccacaccagcactgcatactagcactatttaactagtgctaccgcgaccgcctttaaaatcaaccgcagctatgctattgctacatcctaatcatcctcagcgtcttcactactccatcctcgcccacactacaaccacattcttaccaggatgagctggagcaccgtgcggagggtatggagggtgccgccagcgaaaatatcataagctcttcttcaagctcaaaacctcagtgaggaagctcttgggcaaccacatcgaccgaggtaagctcaagaaagcaaccgacaacctagaggataagagcaagcaatatacgagcgtccggatctcagaaatgagcgtgaagaacgtggagcagtgcctctatcttcaattcgatagccatgatcgggagatgaaggacgtgcagtcgcttccgctccctacctcggtacgcaatttaagacatagagtatcgggggaatctagctaattggatatagtgactacactaggtctcattgagaagacttttggtcaatctagaaccaccgaagctagtgcccggtaggttattgaccctatcattcttaacgcatgcgacagccaccgcagatatcaaaaatgcgcagctattgaatatccaatatgagaggggctatactttcggcccggttacccttgaccgaaagagggtggttctttctggcagaccggactacggtgtctggtatggcgagagcgagtacactggatctatttggcattttttaagaattagtcacaattaaaaggtaagctggttcatatcagccaagtgaatcactctgatatctactagtggtcagaatttgctgttatcgtcgtcggggcgctctcgagaagccgttcggtttgctagtgtggatgctacggaaggcagctgccatctccccaggaaaccttggcggaaacttacagtggagtagggtctgaggagatggataactattgatcttatccctaagtaagatagtattcgaatgagcggtgctaaggggaaggaggagtgttgtactgattcatggcgcagcatggcgttggccgacacctcttcccccttctcacttgagtcagctcttattgcgaggccatcattgctagttgcttaatctctaccttttaagccctctcaagcctctctcatttctccccaccgtcatgtttcgtgcaccttcatactttcttctcaataaagatccccgtaggccttgacaagtgctgcagcacctagggaattttggtgctgagttagggtactgcgccagcataattctctcaagaattgctttaaatggataaaatgggtttggccgcctggcacaattatctaccagcactttatgaatatggtaagggtatagcctgagttaaatctccaatgttcatccacatacaaccctacttcttcccaatctcaatatcaatctcgtccctccatcctccagctacctaccaaacctcatctgcgctccagcaaagtgccaaagaccacgcatatacccctgatactcaaccgcctccccatccccgataattccatgactgcgcccaccggtacaatacatctcggtcaacctcaactgccatggcggatacccatcgagcttaaggaacggaccaaaaacaagcaacagatctggctctggcttgagcaacgtatctggcatcgtgggatccatggacagtggctgcgtagtgatctcgctgatctccgcgtcgaccaactccggtgtgatatcttccggtgaaagcttgccattctggctcatgtccgctagggtcttagttaagtcgacgagggtctcacggccatcggttgaggagaggaggaggattgtcagggtttcgggttgggttgtggtgtcgatgttttttgagatgggtgcgctgcggtgtactgggtggtgaggagcgtagagttggagatttggttggtggctgggggtgccgtagtaggatgcgagtttggtggtgattatttggtggagagccggaatgcaggatttcaggacgccttggtaaaggttagtatcactctatatatcctagaatatagagaggagatcattcataccggacttctcgtatatactgagctggcaaattcccgaacacgaactccaggccgccagttcagcaatctcatccatcaacaccgcgagagcgtcatcttccttccgaagcgtgagaatcgcacttaaatgttgcggcaagcgcttgagattcttcacatctttccggatcagctcgggggtgcggtggtggtgatagacgattgcgaaaatgcggtcgatgacggcatggtacgcctgcaagagacggacgacaataccgaatatgatatgcgtgatggcataggtgaggtagtaggtttgcgatttgaggaatgtgcggacaggcgttttgcgtggtgttttgcggcgttcgctagtcgattgaggtgatggtttctgaccaagctccgtggggtcggggagatagctcttgaggagggattcacgttctgctatgctgagttttgtgccacgggcgcgtagatcgccgcgcaggatctcgcggtctcgttgggagaccattgtcgtggtgggtgaaggagggaagtggagatgtggttgtacgacggaattgttgaacagctggaggttgtgtactaatgatgaaaagttgttattgttatggctgttttcgaagtatgtcaaatgatgtaaagcattctttctatttatattacgatatcgagtccagcttcgaatatctctgcctagtgttcaagtgcacactgtatatagaaatagaatatgtgcgtggcagtaaacctcccggaccagatccgtcatctccctcagctttccccggattccttcctacaattattcccccaacagtttaagggagaggagacaccattgtccagctctgcaggcagctcatgtctgtccactaccaatcatgatggacaatgcatccatcatcacaaactccgcccgcaccatcttcccccaaggccccagtttcaccctcgaagacttctctagccgggacttcattgtcaaggagttcattgaagccctctccgacactgctatatcccaccgtcgctcgctagccggtaccgccgccgccgccgccaaccaacccttcgatcccaaacccctcatccgcgccttcgaaagcgcccaacgtcgcctgagcgagctctccggggacctcgagctccgcgagaatgaactctccgcagccgtccgacgtgcagaagcgcaacacagccagaacctcaacacccttggccagaagcttcggcacaccatcgaaaactttcaacagctcgacacgtctctaaatgctcccggccgcgagcatccagcagggacggggaacatggcagtggagacaggaaagcgcctagaggagctagaccgacagcgacgacgagctctggatgcccatttccttatccaatgctgggacggcgtgtgcaatcggggcgagatctcactattggagggcctgcgacgatctggcacgggagaggcaaaggtgcgctccgcaaacattgcgcgccaactgctgcgcattagtcaacgactagacccgcagagctggcaggaacaccgggctcactcgaatggtgggtacgggaatagctcttcgtctgaggatctcagcgaaagcagcacgccgcggcggaacacgcgggagattattgagaagttctccgagacgctggagaaggacttgctaaagcagtttgacgatttctaccgcaaggctaacttcgacggtatgagggattgtgcgactgtgttgcaggatttcaatggcggcgctagtgttattgccttgtttgtcaaccagcatcagttctttattgagcgcagccagctggtgacggaggaagtcggtggcgatccagagtcgtgggagaaactggctgatccggacgcggagctgcctggtgttgaatccagcctccagtcgttggtcgatgaagtcaaggttgtagtccaggaggagtctgctattattcggcgggccttcccctactacgagcaagttctgggtaagttcttacagcgggtctttcagcaatccatccagcaacggctggaaatggtactggagaaagcggcaggtgtatcgtcactagcattccttcgttgtctacaaagctcccgtggctatattagtgccttgatcgaagatttgaaatcgcacgggttgaccgagcatccggaacctgtttcttcgcagacagctttgttgctggaccagcaactggaggagcttttcgttccttatttcgttggatcgtcttacatcgaacgcgagaagcgaacgttagaagaacttttcaatgcggttttgttcaggttcacctgctaccatgcccgccgcaagaaggcggcaacgactttcatggcctctttatcccgggctggatcagaacttctgtcgactacacgcgatgcatttatcagccggttggattcaccagaggtctcacctatccagcgaaaagttctactcagcatagccaagataggcgatacgctagagacaactcgattgaccgaaatcaagctcacagaagaagatggacaacccaatcttagcgatgctaagcggatgctgaagtggctcgctgaagccgtgggccgaggacttgagctcagtgtcaacagcgacacacccaaagatgtctccgccttgctcaacctgcttctcctcgcgatgggagagggatatgtggatgtctgtctagatgccgccctggaagcggctacgtcgcaggaatccggcaaggccgagcccgacttctcctatctcttctcggctcgcactacgatcagcattactacattgatggtgatgtgcatccatgcggtccttatacctctatcagcctcgagcatcaccactcgccgcgatatggagaagcgcaccagccaaaccacctcgcgcatcgaggacaaaatcaacaccatcgagcagaaaaccattgacgccacattcgcctgggttagtagatcgctatctggccagaagaagaacgacttccgccctagggagagtgataacaccgcatggttagagatgctacaaactccagtacgttccatctaactacccccaaagaaccctactaatcccaacagacctgtgcatcaatcacctcatttttaacccgtttccacaatatcgcgcgcacctcgctcccatccagcggcgccaacgtgcgccaagtgctgaccgagatagcactcggaatccgtaatctcctcctcgaacacttcaaacggttctctgtcagcggacctggcgggctaatggtaaccaaagacatgacgcaatatgctgacctcttcaaatcctgggacattgacgaagagaccaaaggccccggtggcgcgctggacgtgcttctggaagtcggcagtctattcgtgattggcccggaggctcttcgcgaacgaatccgtggtggtgctgccagtggcacgaccggtggccccgggggttcaggacgcaatgctgtccaggagggtaagttgagtgtgcaagaggtgcgggcttatatctcgcgtcgcgaggactccaatacttttgctatgcaacaggttcttaatgcattgtgaggaggagatcttggtctgggatgtttataccctattgtttttgctttgatgggagcgtgttgtttctactgggggatatagaccggcgtaacaataatgcatgcattggtacctgcttgtcttgatatattgctttcgtaatcttgttccatgattgctttaaacaatacgaagataacatctacctagagcttttgtatgtcatgtacgcaccatccaggcatcgatgcgatacgccctgtcatgcgttgcacagcgctttccggaagggcctgtataagaaatccggaacatgccaacccctccgccagaggttataaattctctttcccctcttctcagacttccctgttgtcgctcttctgtcacatcccgacagaactcccaactcagaattctgtcgctagcgggtgtcgccgcatgattcagttcactccactgctggctatctgagtggcctttcatttatgataacagtctcacagtctaacagtctcaactgagcccggcagagctgcacctctcctgtgccgccccgtaatgcaaaagacgggtgttgacatggcatcttgatatcaaccagcccacaacgcaaagtctgctgacggtatcatggtgcagggtgcatctccatcaatcgataatcatttgcatcatgagttcatctatggcaatgcctggagcagctgaatgagcccgacgaagctgaacctcgctaaagtacgtatgatcttgactgacttggtttctctccagtcctcttccaaatgatcgtcgctagtgcgtctccactaaggacaaacagaaaataaaaaaacagaacgcaagccaaagcaagaagcccgagatagaaatgcctagattccaatgactgatcggaaagacgccaagagtgcagagaagggcaaaggccatcttcaacttcgaagtatgcaactttttaatctttacccagtctcgtttgggttgactgctaattcttttgctctaacaggaggaacaaaacgggtctttgtgcccttcctcggttagggctgaatatttcacgacgtcgcgtcgggtaaaaaaggtatgacatcctttatgtacattcagagttccattgctaacatcttcaaggcaggccagtatcaaggattcttcgtataggtctccgcaattcccgactcaggatcctgatcatcaccacccatccctcttatatactccgagttccctctccaaatcccacatatcaaagcccatgcgcagagcgactggtgccacatcagtgatcagagccatcgaaattcttctattcggcatcgcttgctcaccccctgaacaggcaaggaagagatcattgaagtcatggaattggtcaagatctctgggtctccaaatcgtccactataccctactctatgcctgtttcgcggaggacctcatgcatggtctgctggggccacactcaagagggttgagcccggatacctttcatgaaatctcgaaggatgatctatatgttggttatgcttaccactatatatttatcctatacgtaagtcgcaactttgcgcctattgcaacccctcctccctccaccccatcactacatcagtatgaacctgctgaccaatgacacagaatatatatcctggggttgatcacacctcttctcagcgtcacgtcatgtctatcatggctcaatggatgactattggacagtggacgaggaaaaccttcgggttatgagcatgaaagctccaattcttgcttcagaacatgctgatagctgctcatgggaagttgggcggaaagaaatgcaccctccgtccgagcaaccaggatatctcgcagccccatcgtgggtatatgacatggtgaaggcccctcatcctgtgaacgaggtgatccaaaaagatgtgtcggtaaaaccacaacaaacgctaggcgcaatttgagatgacaaacaatccaagcgaacctgtttctgctcacgacaatcttttttgatttgaacaagacggcgaatatactgagctgtgagtattcaaagccaatattctcaagtctagactagactaacacttgtgattcttagattctccctgttcaatcagagaaatcgcttgggaaaggtggaaaggaagaaagacagctcagctgcttagaagtgtggtatagctcaccaggtacaactgcactccatcttcggggctaccaggatgagagcaaaagaaggctacaattaccgcccatcgagcgagaggaccgagatgtcgcttgaggaaaatacgagagaagatggagaacaacctactgaacaaggcacttgaaacagaatgcttgcagggatgaaccgcactaccattacaattatggaagcgtgttcgccgagaaattaatccacatgattgcaggcacagggcacagaagtcgccgtccgcaactcatcgaaaaggagcgaaacggactacaaattcggagacttggaagtagcgtgctccgaagcatcctatacttgcttcgcgacatgctattcgaaaatgtcttgaggaggatgccatgcttacttggcaacatgctgtgtggaatgaggtatccaaaatcattctactgcccgtgatatcctcttctggctagttcatttctctcgtgctggtcatagcggacggttccctcttcaaaaaaatccgtgatgacaccacacggccgtccgcctcagccttgacctgtacctggataatatcgggtcaaggttgaggccggcttttccatagggtacaaatacatcattgtatccatcgagctggatgtatggaaccagataatacaggaggcaatcatcgacaccgcaatagcacgtggtgacataattttcgatccggcatatgagtgaaaaggccaaaagaataccggcaagacagatccggagaaactgggtatcatctgccatctaggtgtattcctagttgctattgccctgtgcttagacgagaaactggatctcgctggtcctgtgtgtttgcttatgctactgtctcacaacttcacatcttgccacgagcaggtagtagtagaacatgtgggtcatctgagaagtttgcagctgaaaaatgatgggcaagctgtccggggtcctggtgttgagccaggttgatttatagtcataggaaaaggactgattggggaacattcacacactgttccggccatgttccttttgcgttttctttgcttctatgtctgctacttctggttttgctttttgcgactatgttgatttccacatagtacacttttcagtggaaaggattgagctctactaattctatagtaaatcttcatgtttgaatagagatagtacctaaggcatagatccaccacatccacactagaaaataagaaaagtaaccatggaacaagcagacagtccggtgaaagctcaaccttggatgtctcaggtacagagctgcaatattatgtacaagccttccgggataagtgggcagatccacgtacaagtttcatcttgccctgaattgaaggtttgatttgtaccatggtactatggctttaatcttactatgttccagttgatcctgtttcttgtaacatggcatgtttctcactacatctccaatggttgatctggatatcaattgtataaggctccttcccaggcaaggtttgtggctgaaaaacccaattggcggcccgaaactttaccggtgaactgcccaattcggaacgttctgactcctgaggttctcaattgtcgactttttcttttttttttgtaccttacatgttatacggagtcgaaattacgacagcggaagaattatctacgtcttcaggtcagtgcccagtttaaaggggctatcaagcctattcggcagtttatctcccggcacagttccccactaagcttacagactcgggtatcatcctaccagagagagacaagcaatggaggtgaaatgcagctagtagctttagttcgcccaggtaggaagaaatatggacgatcatcgcgtcagatctctctggttcgtatgttgcaaggctaaatactcggagtctgctccactgcgcaacttgtccgagtacataaatgaagactgtggaactattgagggcttctcttgggcaagaattgaagtgctctaatattatagttggcttggcattctacgattggagaagcaatagctattctatagacacttgtatggaaaacagggaccacaaaatgattcagttggtccgtggtaggcactcaattcacgacccgcattagtttattcttaaccgtctccatatttatgttcttctggcccggtaggtggatggttcctgcatctctgaagagattttgcagcacatcgcagatacaaaggccacggaaatgatgctacactaccatatcctaatacttgtagtatctcaccctaggttgagaataatgatgttgccataacatcctcattttcttcgctcaaattccagctgtactagtatgccctagcagttctagtctcacaaatggagacgccacccaacctggcccacagtctcaggcaagaaatttactccagggatctttatttgaaaggttatttcgataataaatagaagagatgccctcgaagcccctttcatagcgagaaatccactctttcactggtgacctcgggttgccgtcccttcattctgacttctatacattcatttatgattgcgaattgaatatatacccccaatggctgaagaaagccctagaaaatccatcgtggaagatgtgttcattcccaaagaactacttgcgactgccaaattcaactcgccgtgggaattggctcgatgggaacattctctccccgaaaacagtcgtatatcacttccggagcctcgcaccttttccaaacgtcctctgagtctttcttctctgcgagtagtggcaagaccaaagcctgcaactcggtctcgtggacgcagtgatccttctgcttttcagtgtatgaaattgatatcctatttctatggcaaagacttgtagaaatacatgagagatgatgataatcttatatctcaatactgatcctttctcgttcttcaggtacattcgactactatgaagagtccgccacattcgagcctccctctccgatccccgagaaagaaccaataactccaattcagaatgcattcctcagtccccaatcactcagcaaagtcagctctcagacaatcagcagcgagcagagcagcctgcaagaagtctatgaaaaagccaaattgagaggcgttgctatccaacgaaagcattgggtgcggctattgtttcaatatagcatttatgctttcctcgttctgttcgtctactttatcctcgtcggtatgccactgtggaaaggtgctgtctggtggctgtattattttgtccgaaccaagttcgttatccaaggcggatatgcaattatcattggtctggctgccttgtaagtgttttctcgagtcgccaagtttcttgccctaacaaactagatacgcattctgtcctctgatgatcctcttcgagaaagatcctccagccctagattccgaatccgaatctccagacctggaaagtaatatctccaaggtaaaagcaactgctctcctcattccttgctataaatcagcaacaatcgtcggcgcaacactcgaagccgccttgaaaatcttccccaaagagaacatcttcgtcatagcaaacggcaacgacaaaaaccccctcgataacacagaagaagtctgcaaaccctacggtgtaaaccacctctgggtacctatcggctcaaagatcgtggcgcagttcgtcggcagctacgcagccaaagactttgaaaatgccgtcctaatcgacgacgactgtctccttcccccaaacttcccaatcgccagcgacagactaaaaggcaacgtccgatgcattggatacacaattaaaagtgtcggccccaattcttcaaagggaacgttttgccaacaagcccaagacctcgagtacaaaatgtccggtctccaacgtgctttcttcgggaaattcggaagtgctacattcccacacggagccatctcgctctggaatatcgagttcttaaaacagaccttccatgaacatcccggcttctccgtgtcggaggattggttcttcggtgatgcgtgccggcgtctgggtggacgtattacgatgtgctcgcaggtcttcgtcgaaacagagacgccggcttcggtgttctggagtggttctggtggtagtcgtggtggattcggcgagatgactatcttccaacagcggtttaagcgttggaatttcttcttcgttgttggcgtgtactatgatttgaaatatatcttgactagctggaacctgggttggtgggagtttggtgcaaagttgtgcgtttttcaagaggtatgacaggcacatccatccatctaggatataagctaaccatgacaggtctatgaaaccctcatctacctctttgcccccttcatcctcccaatctcatttatagtccgtccctcattctgcggaatgctactgggtattacggtcgcgatgtacatcctcaacgtcataatcttcaacgagattcacctccgactaaagaaggagcgcattgactggaacgtcttgttgttctactatacgttctacaagatcgcgttgacggtggtcaacgtgttcagctgctactggtcactgtacaagtacgcgcggtactttgcgcagcggcatccgaaggtcattgaggaccgggatgcggtcgaggtgttacttagccttgagaaggattcgggttcgaggatttcggttgaggatgatgttattccagttgatggtgtgctagggaggggtgttgcgaggaagttgacgataacgaaggttcaggctggaaagaggaggatgacggtgggatctgagaagggtggatggatttgaatatataaagcgagtatattatagactgtacatttacagagtagtgcatatgcacctggattgcaaacgatcatggtgggactcttcattctgtactagtaatcctcgtttgatagagtcgggactgtctcacatcttaagtgtccagcccaggagaaatgccaatgtccaggtcttctacacaagtcttttgtggtattatctagttcaacctagctaccattgcttacttgacaggggtctgagtcctggaatcgatagtatcgccaccgtggacagcatcaccaaaacgggcacttgcatcagatgcctcgtatcttttcttgaagctaggaagaaacacaccctaccgtaccagcggtgaatgtttcactcgtttgcttccacaaatagtaaaatacaacttgcagatgatagatcatgtgtaaaagcccgacttcgcacgcctcgacgtgccacgacgtgccacgagtccggaaggagaccccctcgtttgtctcctgcaattggagttatatgcattagcccgaagcaaggagaataaatttggattgctctagagccaggaaacgttcaagggatttgaagcgattgctaagggatacgccacgttccgtacttgagcagaagaaggggtttattatattgtcaacactgtcgattctacacgtcatgtagaaggctagactacctatgttttattaagttccagcctaaaatagtagtctggatcacttgcatgcaagtgctattgtacttcggaataatagccgatcatctgggatatgttgtacatatttgtacattgttacctttcaactaaatctaacaaaagcaaatcattggctcctggtaatctccgaattaccgtctggactatgaaggtaatttaatttggctgagtttggtatagatcactctgatttagaattatatgagctgtcaggtacgcagtagtgtaacggtcttcgaagaaccggtttggttcttttggctgtttagtactaagttagtgtcaggttagttagtgttgactttctttgtcctagtggacacccctgccatgaactgttgttctcattggacattgaaaattcgatacatcacttccccccaagggatgtcgttctcgtattgtctgtttcccgaccgttaactccgcgacaatccgatagtaccaaatattgaggaaatagagaccgggaacagggaaaaggcacaaagacctcgtcgtttccaattttcaagttgaaagtttccccagtcccgatctaggataggtgtgtttcagacagaaaatcagcgatctaagtggagccgagattgatctccttactgggccacgtcaaagcgcgtagtgacttggagcgcgtagtgacttggcttcggtgagcttggtgacttggatgggattgaggatgaatgggctcatatggcttgaaggaatatcgatcgatcccgagttcgtttgacaggttcgtaggaagtaatacagcggttcgtgatagatcagatagaggggcatggaaggatcgagaggtgagatctgggaatagaagtatcacaatcacaatcacaggcagagggcgctaatgtacagcatcctgtcacagatcaaagagtttaaagatattcggtattcttgtgtatatatacagagggatgtctccttttactttttactttctattttgattgttctattgaattgttgcacacggactctataggagtatactatatccttggtatacttatacctggactgccctcgtcctttctattaccccaatcctgtcaatttctccatactcctgtacaatgtcggaggactttgagtcgctgcctccagcagtacgaagaaaggtaagggtccattgttgtcctccctcacacagcactccttcgcgtctcaccgtcacacgctcggacttctcatttccctccccaatagctcccctccacaggagatcggcctgacccaatcaggcccgctttctccatatttcccttttctttgtctgtccttgctctgtgattgattgcgattgactgtgatttacccctgaatcccctcagtggaagctggcaatccacactatcgtccatggcgccactcgttgtctcgtaacattggccatcatggactaaaattggccaatgccagccaatgccaccgcatgggataccgttggctccgccccatcccccgtattgcctatccattgttgtccagtgtccacagctaactcgaacagttcttctcgaacgtcgagcgtttacgtattcggctagcccagagcgatcacggttcccctgcctactccacatcaaactatcagacggataatcgggtctatcgagcccctcgtcttgggtcggaccatcactcgcgtggtttgcggaacggatctaggaagcgagggctcgagaagcgtccttcttcttccaagaaattacacaaacccggatctcttcaattggcgtatttggccgcccaggcggactctcaatgctttcatgccctgcccgccaagatccaacaaaagcttttctcccccgaagaacgtagacggttaaggaacgcttaccgacaaagtctcatctacgacgccgccgacgaagcttaccgccgagattctggtcgagattctggtcgagattctagacaatctcgcgcttccaccgacactcactcctcccaggcaaccgtgcctgttgttcagtcatcgaccgccttctattcggattccgagtcggatgacgaagacccaaacatggatcaaacattccatgatagtttccgctggctcgacgaggatggcgatcttgacttatctctcgatgaataccatgctcatgtggcagatgctgccacgagaaagagaatccgtccctccttccgccgctccttatccttttccaaccatcttcgcaaaacattagaaatcacaactatctcggctcggggactcccgcctgtcagccagtcccagccgttaacacccctctccgaccgaagccccgaatcgcctccgtcatccagctcgagcatcgacccctgtgcccaatactatcaagaccccgatgcccgcttgaaattgcgcgtatacctggcatcgccacaaaagtttgacgaagccattgaattcggattcccctctctggatcaaaataataaggagaatgtctccccggaaccaatcacaccgaaatctatctccccgagacccaccctagtcaattcagattttggcacattcttcgaagacgacgatggcaccatggtggggagcccaggatcggtagaaaaagaaccaatcccttcgcccgtgctcaaacagtgggacgcgtcccgaccctccgaatcatcagttctcttgcagcgacgccagtcgtcctggctgcccgggaccaaggcagtcccacaacggcttccgggaaaccgtgagatgactctcaaaatgaccctcactcggccagaccttcgcacctactctcccagccccccgacttcttccacaggaaaagaagaccccttgcgattggctgaacttccgccagcggatcgcagccagtccatatgggactcggaccttgacgagcaaggtatggtgaagaagatgtggcgcaagctccgacgccgagtttgacttggctaaatgtcccgatcgatttcgattgccttccactcgttttatttttaatattccttgattgttctcaacactaagatgttgtttcttcttcttcgtttggcgtgaactcattttcgttctataccattctggactttttttttcaggatatctgattctcgcgtcttgagcgaagttttctttctccacggtgtcctcgacattttcatgtatctatttagcagtgttctgtacatataaccaagctgctttatgtcaattgattcaacataccatcttttccccgttcaccaccttcagggggtttgtagaccaacagactagtcccaattgtatgctctcatccacggttggctgccactagacgtgtttatgggccacggttcagtcgatagggccgataagcacttcacgtgacagcaagcttcatcctaaggccgcagaggccacgcagctccgtcatcatcactatcttaactcacgacttttctacttgcctgtgcatttctcgctgggctctaacaacactctctttttcagcgacttcacattccctcccttaatcgattgaccccgtattcccggtccggtccgctccagctcccaccgcacaccccatcagatgcctaggcagcaccggtcatgatcccacggtggctgctgctcatactgagcctgctgctggtatggacgtcacagccagcagcggcaaagggaaatgaaccgaacgttgtgacccatgaactcaatgctccgcccgccgaccttttctactttcacggcacaaacaccatcctctaccgtgacaagaataccctcaccgcgcatgtctccttcgatggcggagagaaatgggagatcgttaaaggcaaggatggaaccatagagggcgccgtcgagttgatttggagacatccgttcgacgtcaaccgcgcgtacatccttggcgagagtggcaagcactggatcacgaccgaccaggccaagtcgtggaaatccttccaggtggacgtactgccattcgcatcgatgcgctcattcccattggagttcaatggctgggacccgaaaaaagttatattcatgggtctggactgcactatccttggctgcatgccccaggcgttttataccgtcgacgacttcgaaaatgtccaaccgttgcgcgagatgacgctgcagtgtatgtgggctgcgagccgcccgcagttcgcgttggacctagacatgccgaaatcgataggagaccggattctctgcgtggtccctgggttgaaggggccttttgagcatacccgtacagaacgcttgatatattccgataaatttttcaaagacgatgcggatggcaccgagtccaaattggaccacggtaaaccgatgagcggtatcagtcttcaaatccgctccgtgtctaagtatatcgtggcgcgccttcaatcacgcggcacccaggagcaggctttatacgtcagtgacgactcgaatgtgtggcaccgcgcggaatttggcaagcgccgcattgaagaggatgcctatactatcttggaaagcaccaactacagcatccagatcgacgtgcaaactacctggcatgataaccggatgggaagtcttttcacgtccaactccaatggcacctactttacgaagaacatcgagcacacgaacgaggacctgaatggcttggtcgattttgagaaagtcacgggtatccagggtatcacgatcgtcaacacggtcaagaactgggaggaagctgagaattctgatgcaatcaaaaagaagcttatcagcagtattagttttgacgatggaaggacattccagcctctcaaggctgataaagacgagctacacctccattccatgaccacctacgccgctctacacgagatgcccttcccagatcaccggatgttctcaagccccgctccgggcttgaccatgggcgttggtaacactggaggtcatcttgaagactactcggatggtgatctttacgtttcagacaacgcgggtcttacctggcgtcgcgcgctcaagggcccgcaccggtacgagtttggcgaccagggaggtgtgattgcggccgtcttagatggcagcaagacggataaggtccaattttctatcgaccacgggaaagagtgggagtcgattgatctgaagcagaagatcaggcctctgttcctgatctcaacgccggattcgaccagcctcaagttcctgcttgttggcatctccgatgatgacaccaaggtcctcatgttcttcatagacttcgatggcctccacgagcgccagtgtggcaccgatgacctcgaagagtggactgcccgtttagatgaaaagggcgagccggattgtctgatgggtcagaagcagttcttctaccgccgcaaggcaaacgcggattgcttcatcaagaaggagtttgccattagcggccctgaattcaaaccctgcaagtgttccgctgaagactttgaatgcgactacaactttgttcgcagcgaggaccgcaaggagtgtctaccagctgtcccgctgacacccccggctggcaagtgcactgagcccaacgataagtacatggggccctctggatggagactcatccccggtaactcatgtatccgcgaaggcggcgagaatctcgaccgccagattgagcgctcctgctcgaatgtcacggggcctgctcccattaccgatggcaaacctcgcgcagaaaagccacagatcatctctgccaaagatacaaactacttctatctcgaacgacaggccagtaacaatggcgttgatgagactatcatgatgctcacagacaaatatgagctgcatatctcgcgtgaccatggccggaactggaagcaggtccacgcggatgagaagtttacggaaatggtcccgcatccttacttcagtgatgcagctttcttcctcaccaacagcaagaaggtgtactacactatcaatcatggcgattctttccacttcttcgaagctcctagtgtgccgaccaaggagaacatccgcgcactcgctttccatgagaagttccaggactcccttatctggattggtcacaaggactgtgaggggaagaactgtcgctcacaggcgtacgtcaccgacaagcgaggcgctagttgggacccgatgcttattggagtcgccgacggcggttgcaactttggatatcacgagggccgcaacaacagtgaaaaactggtgatttgcgagcagtataaagatgaggaaaagaacaataaccgacagctggttatcagtgatgactatttctctactatggacgtcaagtttgagaacatcgcccgttctgctaccaagaacgggttcgtcgtcgtcgcctggtacgaaggagaccagaaggaatacctgaatgccagcgtcagcgtcgacggtcgcacttacgcgaatgtgcacttccctttcaacatcaaggttcctcagtataccgtcctgcctagctctccgcacgcattgttccttcttgtgatggttaacgggggcgatgaacgcagcttcggctctttggtcaagagtaacagtaacggcacctactttgtccagagtctcgaggggctcaacgttaacgaccgcggctacacggactacgatgagttgcaaggcctcgagggcgtggccattgccaatgtggtttcaaatcgggaagaagtgctgagcaagggtgccgccaagaagctacgcactatgattacccacaacgacggtggtcagtggatgcttctggctcccccgagtcaagatgtcgatggcaagaaattcggctgctccgttacggagggcaagggcactgagaaatgcgctctccatttccacggctacacggaacgccgcgattatcgcgacaccctctactcgggctccgccatcggcctgatgctcgcgctcggaaacgtcggtgaacatctcactagcgcagctgaagccgacacatacctcaccagggacggcggcatctcctggacgcaagtcaagaagggacaatatatgtgggaattcggcgcagcaggctcggtaatcgtgctcgtcagcgaccggaaggccaccaaggtcgtacactacacgctcgacgagggcgcgagctggcacgagttccagtttgccgaaaaagaactggtcattgacgatatatccaccgtgccatcagacacatcgaaaaacttcctgctctggggcatggacgagggcaagcgtgtcaccatcacgcttgacttcagcggtatctggagccgcgactgtaacgacgatgagaaagattactataactgggcccccagtcatcccttccaggaagaaaattgtctcttcggccatgtcgaggagtaccaccgcaagagacctactgctgagtgctggaattcctggcgtgagccacatctccacagcatcggccggaactgcacgtgcacccgggctgatttcgaatggtaagcaaaaacacacaatcaccccctcatccaatctaaataccaactaacatgaaacagtgactacaactacgaaatccaatccgacggcagctgcggcctcgtcccaggtctccaaccccaagaccacatcgcacaatgcgcccaagatcccgaaaaggttgaatactgggaacccaccggctaccgtcggattccgcagacaacctgcgaaggcggcctcctactagaccaggacgtgtcaaaaccgtgcccatccaaagaaaaagagtaccaaaagaagcacggcatcagcggaacaggtctattcttcgcgatcgtgacacccatcgtcgccgccgtcgccgtaggctggtacgtgtacacgcactgggacggcaaattcggccagatccggctgggcgataccggcgtcgcatcgcatagctggttatccagggactcggtgctggtcgtggtacctgtggcgattatcgcgggtattgttgcagttgcgcagtctttgccgttacttgttaagagtctggcgcggagcgcgtctggtctgtttggcaggcgtggggcgcagagaccttatgctacgcgtgggtcgtttgcggcgaggagaggggattattcttctgttgttgatgatgaggatgagctgcttggggctgatgattttgacgatgaggaggagcaggcttagactttgacttgagcttaaatttgggcttggattatgagtttgagtatggaattttgatatagctgccttttttgtggtttccgattggaaatgatctttttggggttttgactcttgcgacattatgagcgtgccatgaacctttttgctttctttcttcttcttcttcttcttctttttcttcttgttggtttcggattcggttttcatacgctgtggttgtggcccttggcttttatatacagaaggctctctaggcccgtgggctgtatatcccccattgaacaaaccaaaattcagatttttactagatttcttgaacagaaaccggtaaatggatttaatttcaatggatattagactccgatccaactcctcgccctcttttctgtctctgatatccataaacacatccctatctctatttaagatggtcgggtccgaatgagtcgggcagcaactgggttcattagtacagagaatggaagatgtataaaacagatatatctaaaaaagagaaaagaaactcacctcctccatagtcataactttgtaatttccctcaccgtcgtacatgtatactgggaaagaaggcgaagtaaactcgcgaatactgtatcccaatgagctaggcaaaaaaaaaaggaaaaaaagaggaggaagaaggagactcacaactgcctacacatcccacaaggcgaagcagcaggtttgatatccgtcgcgacagccagagccttgaattccttatggccggcaacctgtgggagttagcaaagatccagacttgggccggttcatataacaaagacagtgataacaaccgaagtagaccaggggaagataacatagaacatacaacagcagtgccaaaagccacgcgctcagcgcatgttccgactggataggcggcattttcgacgttagcgccggcgatgaactcgcccgatgtcgtgaggatgcatgctccgacacggaacttggagtatgggcctgggaaggtgttagttcggtgttgtttgtacttaaaactggatatcgggtgcttatgctgcttcaaagggaaggagggaaagggtcatacagtaggcagttgctttggcgtcaatggccttggtggacagagctgtcagctcctgggttgtgagtgtttgagccattctagttaatgtcaaatagagaggtgttcaaggaagaggggagatgagggggattttatccgctgataggcgataggcgattttccaaggttatgcaacgttgaaggaggagatatggaggtgattggttgttttcagatggttacaatgtacaagatatgagcattcatttctgatgtcaagtgagatgggttcgaatattgctctgatatagaacagttagccctaaatggtatgttgtatgtgctacagtaagaaagttagagaataccacaccgtatcaatacttcagatactacttgatctagcagactagatacacctcatgtcagaattaagcatacattcaacagatattccaattattctacggagatagagtatcttcagatatgggacgttgaatgcccctggacatatggataatgactaagcattgtttccctcctaccccccccccgcttatacgaacatacgatgctctgagctgtaaacagctctagagacaagtcttgtcatcccccaaacatgcccgtaccctttaatctaggcgtccaagtcatcaacggcaaaaagacctttataccactaggtaagctcattcccctgaccagaccaccagtctcacctcaccaatctcaccagtgcaacagagaacaatccagaggtccacgcgcatctatgtaagaaccttggagtatccccgagcctcaccttccatgacgtcctctccaccaccccagaaatgctctcctggatcccacggcccgtgaacgccctcatcctcctctgcgacagacccatctacctcgctgtacggtctcacgtcgaacacagcatacccgagtatctcggcagcggagtcgacgagcccgtgctatggatgaagcagacgatcggacacgcgtgtggactgatggctttgctacacgtggtggtcaatttggagaacgggaaatatgttctggccggatcagagctggagaagatggtaaagcgggcagtcagcctagggccggcggagagggcgcggctcttgtacgattcgcggtttctggaagaagcgcatatggatgcggcgtcggaagggtgctcgattgtgcctttgccgcaggaggaatgcggctttcatttcattgcttttgttaagaaagatggaaaggtttgggaattgaatggaggcatgaatggtcccctattgcgaggtgaattggagggggacttgttggacgacgaagggctggatctgacggtaagggagtttttacatgctgccgacacggaagttcatagggggatgagtattattgcagtgaataatactatgtaacttctgtctttgtgacttctgtctctgtctctatgtctttatgtcttatgccttatgtcttatatcctatacgacttatcatgatattaccatctatcgatgtgacgtcattcatctaaaatccggggtggcctccaaggtttataaaccttggaatcctacttatcattgttgagttgtgcttattcttagcacctacagtttatcatttatactaccctcgaaaagactcgaaaactaactgcaatgaccacaatcatcgtcaccggcgccacaggcaaacagggaggctctgtcatcaacaacctcctagagaaaagtgcccctttcaagatcctcgccgtgacccgtgatgtcaattctgcttcatcgaagaaactcgcccagaagtcttctagtatcacattgatccaaggcaacctcgatgacccggctgccatctttgaggatgtagcgcttcaaacctcggagccagtctggggcgtgttcagcgtccaagtaaatccctgaaacacaatacctcagatataccccgacttaccaataaaataggctgtcaatcccggaaacaccgacgaaagacgccaaggaatggctctcatagacgaatccatcaaacaaggcgtcaagtacttcgtatacagctctgtcgaccgcggtggcgagaaatcagacaaaaacccaacttcagtcccgcatttcattttcaaacacgagatcgagaagcatctcaaggagaaagcaaacgggaccgacatggaatggacaattctccgtccggttgctttcttcgataacctcacgccagattacttcgggaaggtgtttgcaaccgcatggcggatgtatctgaagggcaagccgctgcaggtgatcgcgacgagcgacattggattctttgctgcggcagcattcatgaaccctgaagcttggaagaatcatgccgagtcgcttgctggcgatgaattgacgtttgatcagatgtcggagattttcaagaccttgactggcaataacgtaccgaccacttttgagatgccggtttggttgatgctgtctattgtcagggagatgggtgccatgttcaaatggttccatgatgagggcttcggtgcggatattccggccttgaaaaagttgcaccctggtttgaagacttttggggattggttgaaggaggatagcaaattcgagacacattagtgttggttgttcttgtttggatttcagaggactagttattatgcgaaagaggcctttcgcctcctaccttcgcttgagattggctttgtttgttctggattatatgacaatggtaactgagaaactgagtcaccctgggtgttaaagttggaatgaatttatttgcaatgtttcaattctattctatacaaaaaaataacaagccaagatggcagaaaagctcagattaaataccgttcaccagattcaaatgccgagtagcgagcgagtgagatatccaccagggagtgccatagatgggccatcatcggctagactggagatgcttggcctgacatacatcaagccaggcaagtcttttaggcacaattcgatgcttcacaaatcgagcggaaagcgttaaacaacgcttgattttcaaaagaaacagtaggttaggcatcgagaaggagaagtaaaagtgaaagaaagtgtagaagcaagaatcgtgtttgaatgtatcggggtatagcgcacgatgccaaaatccaaagagttaggtattgaagaattcaaaggaaaaatggggccagcatagtcatcgtccaacctcagttagaccgatagaatagtgacaaatttctatatgcaggggaattgtagcagtctctctgctctctttttttcatccaaaatattgccgtagtccttcataaacagtgaaaataaacgccgagctgggtgctgagcgcgcacaggtgatcccgcacccgcggtacatgcccttgagcccttgctgcctccatagagccttggcctcgccccagaatgaatgtttttgagcatggactggaagtcgtgagacgtctacagtctgcatgcgggactttattgtatcggccgggtagaatagaaagttgtagctcattccagatgttgctcctgcgatcatttgttggtagacggggagcgagtcggaggtcatgtgcgggttcgacttgttatacttgcggaagagcgacgatacgccctcgtatccaccgaaccacgctgcgcttccgccggtttcccggattaaggttcccagttggccccgccagaatcctgccagcccttggtgtcggaagatgcttgcgatgatggccacggggccagcgggtttgaggcctgctgattctgcggggacctgcatcctgcatttcaccagttcaatgggtgtgagtaccagcgaggtgactgagccagatagggctccgctagcaatgagagcggggattggtaggtgctcaacgcctgggtagaccgttgcgcgcagggtatcctggatgagacgatagctgaagaagagacagctggtctccaccgcagctccggccatgggggcactaatgcctctatatagtccccggaagccatcggctcggatagactggcggaaacaatccagtggtcctgcatatcggagaggaaggtgttcggcttgtgactgtagtcggaccttgacggtgtcgaaggggtactcgatgagtttgcctgccattcctgccgacttcggagagtgtcagtctagatcgcccacattcatgtgccaaggacttccttaccgatccaaatataatatcctttatcgcctcaaggccctgattaggcggaagcgatggcagctccatcggttcactgatggtgatcgcatgctccgtcgccgccatcaagtaagatcgggaaaaaagacaaggtaaaagagtgttatcgagggatcatggtaagatgggggaccagaggtataagtagtgaaggaaatggtagtggggggaggggcggtgtaacgagggatttgatgggcttatgaggtgccaagacaccgtgcagaagctaataaggagaaatgaaacgaggacagccctaaacgagcaagaagatggacactgaatgatatagaacagcctgtaagaggaagtcaaacgtggaaagtggacaaaaggtggagtcaggaaaattgggccgaagcaatttctctctttagcggacgccaagacattttatcagatcgagataatcaatgaaaaaactcggtctccgttttgtctcgacgtctcttttgcttcaagtttcttccccccccaatccactttcttgaaacctccacgtggaactggtctttttccaagtcacatattctatcatgtctacctcaacggctacgacatcagttgcgcctccgtctgccggcgtacggaaaaatggtaagtgaaaagaaaaaaaaaaaaataatacgcagtccccacttccctgctctccctcatttccccggctaaccccatcggactttcaggcaaaaactggcatgacaccaagaaggcttttcgtcctactgcgggtttgacctcgtacgctaagcgtcaagagctcaagaagcacaacgatgctgtcaaggaacttgaacgtgagatgaaggaggagcatgaggctgaacgaaaggtatgttgatcttatttcttttctctcttcatctgtctcacttccctttccttttgtatctttgtctggtctctatttcccgtcagcctgtctccataatcatgcgacaacatttcccaagatggtatcactgaccgaagaacccctgtaggcccgtatccagcgcatcaaggaccgccgagaagccaaggaggagaagctacgttacgagaaaatggccgagaagatgcaccacaagagactcgaccgtctcaagcgcagagagaagcgcaacaagctgctcagctcttaaggccattcacggtcttctctatatctccgccataccatctctccatctcctccaggactgcattgtgtgtatatacatcggcttgttgaggcttcttccttcttccctgtccctggcgggaaagtctgggcactcattctggcgtgggcttaaaaggcgttttttctgaggttaggtcataggtcactactagcgagcaagacgaatgtttttctataatcgcaatatattcggtaacgtaattgttgtgtccagtaatataggtagtaggatggactatactgtcagctgcagagtcgctgatcagtcttcagccttggcgtcatcgatcttcccaactccacactccaacccaaacaccaagcctccaagcttccccaagctttcttctcagaatgtaccaccatggagccttcatataaaaaggcatcattctcaaaatcccgaacagcctccgccacattcccacccacccaaacctccaaccggggcccgagccagaaccagcaagccagcgacctccaggccaaatcagatgacttctccagattcagtagccaaggaagtcgccaaacagaccgaaaaaagtctcatcgctcgcaccgccatggctccgatgaccgccaaatctccccaaaaggagagcatcgaactggctcatcccctcagcaacaagagccatccaccttcgatggcttgaggtccagccgcaacaaatatcacaagtcgcgggagtcgcgcttccctaatcccatgatccacctggcttcctccgcgagcgcgaggggattgctccatacttggtcgggcgggaaggataaggatcgcgagggcgatgatgggttgttgaggccggttacgagggagacgacccggagtcgatggggatctgagtcgactactggtatgtcagatggtcggaaggggagtctgctcgatacacctggacagcatgagcaattaatgcctttccgccggcacgagattctgtctatggatgacctggagaaggttaagaagcggagaaagctaggcgaggagtatgtgtttttctggcttctttgcgcataggaaatcgactaatggttgttccaaggtatctacggtctgcattgacttcaattgggacgttagcgacagacgtcacccgtcggctagactacacctattacaatctgcttgagaaaatcacagcgctcaactcgactatctcgtcgttccaggaactctccgactcagcatcaacattcctcagtgacttcgaacgtgaaacagtcgaattagaccaggatatccgcaaacagctcaatgacctaaaaggcttcgagccacaggtccgcaaggctgacgcgttagagcaacgcatgaaagtaggccgacagcgcgtcgaagaactaggcaaacgactcgagaccgtacgacacgagatcgatagctgggaacagcgagaaacagaatggcaaacccggactagccgtcgactacgtatcttctggggcattgttacaagtgcgctgttggtgcttgtccttgctctggtcctccagaactggccacaattctggtcttcccacggtgaggcgtcacgtttgacaacgtcaaaccactctttgccctctgtgccacctcagtccgaggtgtgggatcacgttttcggtctcggggaaagaggtttagagtctgatgcagggcttgctcgatatccgtccaaccttgcaaatcgtcgcgagagcctggacaaggctggtccgacttcgacgatccgatcagggcatgatgcagcagctgcggaacgcgatgctatgagtgcgctggatgaattatgaaaaatttttcgctccagatccttgactagatcaattccctgatctgtgcttccgcaggtttctggtttctggtttgtgcttgaattatcttcaatttgtacttttattttatgtttatgtcatgatacccagtccgcaaaggattcgtgttcgtcattataccgggccctcgctcttcttcttcttcttgtcttcaatcagttcgatattagacgcggggattttcttgccgtggacctcgaggagccaatcatgcaggtcatcactgacatcaccctggacggtgatctcctcaacgcccgcaggcgagcgggtcacagaggaacccgtagcaaatttcttgcccaggtcctttgcgatcttcttgttctccaatccgaagacctccaggccgatcacgaccgtcacgtacttgcgcttgttccgctcgacacgtttgatctgaatcttggaagcggccttgcgctcgctatcgcgtgcctcgctggcggcagctttggcctctttcttagcggcgtctttagcggcgcgttcttgtgccgagacggatagggtggagaggttggcattcagggcatctgatagaaagaaacccagtgttaggatgtcggtgtttccctttccgggcttgcggatcgcccgatgcaggtaaagccagtcaagtagcgtgggagcttcgtaccttcagagtatagtttgtcccatagatccgactcgttatctttgagccattcttcgcatttcttagcggtacctccaaactcgcagtactagacaaaagccccgcacgtcagaaacatgtcagatctccaatgagagtatagttcaaaaggcaatgcacgcaggctcggtgggcgcttttcagtggctgggagttatgccacgcacgacgcagccggggtccccagataagagctaagagccagggtccagagcggggaaaaggctgagttttcacttctgggtgactggaaattgggggattttgggaggaactcaaatgtcatacctcggggggtaatgtgcagactatgatcgattccgtcagcgctatattctcaaacgaattggggttgtgttttgcgccacgggggtcctcacctccacagtacacaacatgtctagcctgtacaactggggctgtttctacctcagccatgatgtatgaaaatagtaccgtgggtaaatggtagctatcggcctagacttcttctctgccagaatcaacatagcgggggcggaggggcagttctgccagctacacccggtttggatatcacgtgcaatgacggtcattgattgtcttccttctaccctgctttagtggcagactagtcaatgtggtaatatggtggtgcttaattgctcattattgggccatcttacatgctcagctagaatggttttttttatcttacaccaaatccggattgggacaaacgtcgctcatcagcacgacattacgtatctttgctaatctccccctcggcagctgtctccaggatggggccacatcccttatcccccggttaaccgaaaccggaaaataggcgatgcaggaagaacaactcgataggagccgtttaaggtgcagctgtggttaccaccacgatagcaggccaggcgcgccaattggtgcccccggtttacggtagatccgcaaatggctgataaggatagtcgattgcaatcttgcaactcctgttttgtcttgcatttcatccattcaattgggcagtcaaaaccggtctccgtcagctagctccgttatcaagagacttggaagcgaagctagtggcgaagacaggaaagagtggttacgttacccctgtggatgttagtgctggcgagatgcgtcgagtcaatgcagagaaagtagcattgactctgatactgtcggagccaatgatcggcgtggaatatgacaaacgttaggaggcccgtggggagaccggggtgcgcatcgcactagcgctacagatcaagcctccgcggagaggtggaggtttcgcgaggtgtccagactgggaaacttacgacgttatagcgatcgtttcagttttccatttccaggttcaaacacgaatacaccacggtagcatgcagcaatagacgattatcactggcttgcgatttgcatcaaccatgtcgcctcctgagaattgatgtcgatggctctagccctccaatcatgacggtgctcggtgtatggttgcccagatactctcgatgcaagcgcacagacaaaggcaattctgtgtacgacacctcttttttctctttttttttggtcctttggcatgtttggcgttgtttagctcttatcttgcatattctcgagctgcccgtgcatgggtacaggattaggaaggagttaagttgggactcgcaaattcgagcgaatgcaaaagtcgaagatgtcaatggctgaagagatacgccaccactggaaccccgcgtattcttttataacccccaaaggcattcctattgctttgtactcttggcctcggctagtatctccggtcgatcatggctaatttttcctttaaattgtggtttgacagccaacagggtcctatgtgttactggtacaaaagtaccatgacgggattctagaaaggctagtgcctcggctagtactactgacctggccaaataatcccaaataattcccaaaatcccatccaaactcgtttcgaagtggatcacatcaaaggggtccgactctcttcgaaactaacgtgctcaggccgtgcggatgcatcggcgggctacaggctctaggccgaatggctccgtgaaactccgattatggcgattataggagtagccctggagatagtactttgcatttctatacaattccaactattctatactccgaatactccgaatgcctagtctgtgtatgtactggatagacggagtactgtatattatactctatatcctctatagggtaccctacatactcttcttatatgctccacaggatcgaccgttagacaaggacgcatagcaccttcggtacactaaaaccctcttgcatatctggtggagaagaatgcatcggtctagatgattcagtaatttatgagatgcgtattggatgtgttgtaactacggagtattaagtattctaacagtcgactagctcgtagactaggcccaagtgagactaagacgacgactacagggctagaatagatttaatttcttgtggcaacttctatgttcttttctataattatcaactctgctttatgaatataaacttgttatttgctttttctcttatcccttcccccaaatccccaaatcccccagaatccgggaacagccataatatccaccttggagtttggttccctatcttcacttcttcacttcctcttcctcttcttcttctcttcttctctctcctcccctccccctcttctctcctcctctcctcctcccatccttggggtcttatccccgtggccaattacctggatatgctatatccttgaacggccaatccctccaacttattccctgtgattaattacatcattgaaagaaaatgacggccctgttggcgccccgcgaaactcattcgccattctcggatcctgtgcggtgtcccgctagtcccactacgcagcgatatttcctaaaagatcacgccatccccgcaaaatcacccatgcaagatgaccctcacgcgacggaccccccagtcgcttcaaacctgccctctgtgctcccctcttccaacttcgctcctatcaccgagcaactcgcctatccatctactttaaacaccctcccctcggaaaacgaactcatcctacccgcctacgacacagaatgcttccacaatgccaaagacccagaggatgtcagcgacgtgtcgacagaatcacacccattttcgtggacgtcacagcctccatcggcagatgacaccttaattgaggatgagccatccaggcatgtggactatctttcacatgactggaaggaggaggatatctggtcctcgtggcgttatgtgaccagtcgaaggaacgattatagcaatggagtgagactagagaatgcctcgtggaggacatgggccaaggccaagcacaatctgaagacgatatcgccggaaagcctcaattggtatgtttttgatcttcttaatctttcatcttttgtttatcccgctaacctcgtactaggctcaaggactgcgatgtcacctggctctacgggccattgaaaagttccgtcgaacgtggaacctctccatctccgcctccaagttacttggaaacaccaacctcttatctagatcgaaagccaatcttgaagaagaagaccgcgtccgaggccatccttcagcgatccctgtctcaacatacgttactccaacatgccggagccattctcaaggcccaagaagccgagaacaactgggctcgaccctatttcccaaggtccaacacggacttggaccacttgcatcaccggactggaagctcgacctactctctcggtggcactctcactgcctcgtcagcatctggaatgacatctcccggcgaacggcgccatatccacttcaacgatgaagtcgtgcaatgcatcgcggtcgaagccaagggctacgaggacgattggccggctaccattggagatgagtcatcttccgacgacggcgtagtcttcatgagacaaatctctaaccggtcctccctaagcaaccgcagcactccacgaaacagcttcagcggcgatgggaaaaccatcgcccctctcccttcaaccacgctcaagtatcgtggggatcctccggagctccacactcagacaatccttgaccgatggtcccccattcccacccggacattatcaccaactccctctgtggagaccctacgtccatcaaggccatcagagcccgaggccaactttcttttggatgagtgcgaagatcccagcctggacttcacgggcaattaccccgatcatgatcgtgcatggtttattgaagatactgcatcagaccgcacgccccgattcactgcttcgggcatgatcatgccggaaggcgagaccgagacccccagcagtagtatatatcaccgggtcgtggacactgtgaacacagcccgagacattgctcatgtgatctggaatgtgggctggcgccgctaatcttgatcacaatcttcacgactgacgatggcggctagcccgtcgtacataatggaaaaaggcaggttacaccctgtggcgtttggggggaaagatgagcgtggattggatttggcgcatttcttttgtatagaatcacccgggactgattgtcaggaatcatgtaacgacataatgcataaaataacaaatattgaaacaatcacactgaaaacccagctatataatgtatagatccgcattggggaaattgcgaggttggtttatgataatgtagggggttgacctcgatacaactatttagtcactgttcttgtttcctcccaatcctcaacttcttgatactatatgaaatgttggaatactacttaatctattcatgcttaatagattaaaagatcgacatcaccgagatcaccattcaaattccaattgccccacagtcccccccccctgatctcttcctctccttgaacttctgccgaggtctttcttatgagtttcaaagacatggaaaccgtcagtgtcgccgaattggtcgagcgcctcggtagcgatgaagacgccgtgcgcaaaatggccgtcttcaagctccagagcaacattggagacccgtccttcgccgacatcttcatcgcagagggaggcctggttcgattacgctacttaaccctgaacgcaagcgggaatacgctggcatacagtttaaccagtttctcgaggctgctcgatgtcgacaaggggtgggagtgtgttgaccatgagttggttgagcgcgtgagttatgcttgaggcgattgcaatgccctctacctatgttgatgtggtcggattctaatgcgactatcttctagactgtcgagctgatcgtcacccaccccctggtcaacatcctccgcggcgccatgtccattctcgtctctattgtttcccacccgtacatggggaaccgcgcctcccagatcaacaactttggtttccgcgccctgaaacctgcaatcgccatataccctcagttcctggagatgctagtcagccgattatcctccgcggaccatgcgctgtgtgccaatgcgctccaattgataaactcgctcatgcgcgactcgatcacccacgacccggaggcggagtggcccaagtttattcagaggttacaggatctaggcgttatcagagcggtttacgtgcttatgcaggattccgcccttcaggacctggcgcatccgctgttggaattccagtcactcaccaaggtactgctacgcaagtggcgagatatccccgtcaaccaggagacgcctgagcatcgccgtgcgctgaagggaatttatctggccagtaacccggggaaaattcccgacgagcctacggagaatggcgacgatacacggcgctctagacgacatcatccggaaaagtggaggcggcttgggtttgagacggagagtccggccggggaattctacgaggtcggcttcctaggtatgatggatctggcggactatgtccgcagtcatggggaggagtttcagaatatgctcttggagcactctacaaagccagcaggacaacggtgtccgattgctcgagcgtcgctggccgtcacatcgatcttatatgagcatttcgaggtcgaaaagtccgacatggatgactcaaaaacataccttctttcagagtcccgtacgggctttgataaattgttccagcccctgttgttacattggacccgcctacatgttgccggcttacaggccttcttccgcctgtggaaggcgactgccgccgaggaagaggacttggacaagctcattgagctcgtgcgcatcctcattgagtcggtggtcggcggagctgctcgaatcaaggatgtccaggatgtcgaagaggaactggccgatttcgaataccaccgcttacgcgggctgcagatggaacttcttgaacttacgtacgaggatgcatggggccagcacttgcgacaggtgcgcgaggaacttcatcatgaggctctccaattcgtcaaagagcaacgaatccgatccttgctccaaggtagctggttcgctctggactcctctaagtcggagtcgggggcgttgcagaagtctagtgctacatatcaatatgcccagctctctcacaaccgacgatacctgcatttcggtcaatttgacctgatgggcgaacaagctccggagttggacaccctaccagagaaaagtgagtgtcaccgagtgctttcccgtaatcacactttttgtatgtgttgctgacaccgaaccgtgccctcaacagtcgatctctcaatggtatcatccgtagtctcgaacgtctccaccagcccagaccattcctccacggctacggtgaagactgcacctcggcaacccgcaaccaagatcaccatccacggctacgcaccctccgcaattaccggacacggaaaaggccacagccacgctcggtccgccagcaggaccactcaaaaggaggtagtcctgctcacgctgcggccatcctcgcagagcattgcgtccgaatggctagatggcctactgatgcttctcaaccagcagcccatcactgcagagacaagcaagctgattgatctaatcagcaattacgggttgaaaatccgcctgctcaatgtgcggtttgacgacgccactttcgcaggtgaggctccccaggtcccttcgagagatggcttggatgaagattactactatgatgtatttggaggcgcatagggggtacttccctctatatatgtgtgtcttttctcttgttgttggggattttggtttctttggctctgccgactcggattctggtcaatatacccgctgtgcgatctgtcttatgaatgtatctatttctaatatataatttaacgttagcaattgcatctgtatctatgtgttcatctcatctcacatctataaatctggcaaaaggcccaccgcttggcgtcataagcttatcggactcgtatctcaatttctccaggtttttgaccaactcatcatggatggcggtcgtcctcctaaaagacaacgcagatctaaggatttaaagcaagatgagccgaaaagacaatcaaaacgaaaagccatcattatatcagatagctccagtcctatcgaaccagcggaacccttcgctctctcctcacgccctaaaccctcctactcgcgcggcacaacaccatcaacccggcttccctcgtcctcaccctctccgatcaaaagaactaaatcaccagcaaagccagactcggactcgaaatcaaagtccctgcacaacttctttccgcccgcgacagagggacagcgatgggcaccacaaaagaccgagaagcaatccctcccgccggtcacggagaccatcgacgtggacctgattgaggatgattatgactcctacgatgaaatcttcacacagcatctagctaatgagcggatgagtctggcagccatgggctctagccagacacgtcagcctgcgccaaagccagcgccgaagccaaagccaaaggcctcagtcaaaccaccgcggaagacgacgaaacggttccttctgtctacggactctgggaatggaactgcgaaggaggcattggctgcacaaccggctagcgaaccggaccgtcgaccatgggcgcagcggttcgctccggctaatctgggcgaattggctgttcataagaaaaaagtctcggatgtgcagcattggctagaggatgcttttgctgggaggcgtcccgaggtgagtttttgatttgagaataattcgaggttggggttgaatgtcgttctgacagtatgcagaggttactcgtcctacggggtccggcgggcagtgggaagacgaccactgtgtccctgctctccgagtcaattggttacgatattgtcgagtggaagaatcccccggtttcggaatttggagctcgcgattatcaatccgtgagcgcacactttgaagagtttcttggacggggtaataaatttggagggcttgacctcggaaatgccaccgagcccgattctcagaaagacgagaaacctcgggatcagcgaatacttcttatagaggagtttccgactgtgtttggccgggcgtcctccaccctcacggcgtttcggacgtctcttcaacaatatctagctgccgcggcgaatgatcatgcccggggcagttctggatcgaatcacccgcctatagtgataatcgtgtcggagactttgttgagctctgcgtcttcaatctcagataacctgacagttcaccggttactggggcccacaatctataatcaccacgggacaacgatattggatttcaatagcattgcacccacttttatgcacaaggctttacggtctattttggacagagaggcacggaactctaggcgtgtccagataccggggccaggtgttattgacagtatctctgaaatcggcgatatccgcagtgcaatctcctctctcgagttcctctgtctgaaaggggacgaaacgggaagatggggaggcagcgtggccaaaacaaagaaagctcgaggtgaggttgctttgacaccgatggagaaagagtctctcaaattgataactcagagagaggcgagcctgggcatgttccatgccgttgggaagatcatgtacaacaaacgcatggacccgagtctgatcgagggcgatgtcgagatccttccaccgccaccggactatctgcgccactatgcccgaccaaaagcctcgcaggtattggtcaatgatctggtagacgagaccggtaccgacatatcaactttcatcagtgctctccatgaaaactacatcccatcctgcgatggggataatttcaccgactctctcaacgactgcatcgatgcactctccgatagcgatatcctcagcgccgaccgccgaccagggcaaggggcgcgagccgggataggaaccggaatcacctctttcagtagcggtacagacgtactccggcaggaagaaattagtttccaagttgcggcgcgtggtcttcttttcgcccttccatacccagtcaacagacgggttgggtctggagccggacgaagccgcgctggtgatgccttcaagatgttttacccagcttctctgcggttgtggagagaggccgaggaaatcgatggactgatcgactcgtggatgaaccgaacactcgatcctagacagcagcatctttctcaaaatggctccggcctcacgggggtcagttcctggaaaaatctccaggtgggaaggtcgatatccgccgactcgggaaacaaaaatgacaccccgagtgtggtcacgatgatgccccggcatgatctactgcttcatcagttgccctatatggctgcaatccggcgtcaggacccagattggtggcagttggataagatcaccagcgttcggtccaacgagaatcttcgtaatgatgacattgacgacatagaggagtctccagcttcgcggtcgcgtgggaaacaatccagcagtcgtgggtttggacctcgactgcaactgcccgaagagaaattgattctcagcgatgatgacattgtcgattgagcgtgatatttctgcgtatcatgtctatcatagtaaactatttaatgcgagaacataaacatgtactcagtatgaacaatgtagtcctgtatatactcttcgagactggtttgcatactagattataaccccttgacaatgaagtagttgttgaagcagtttttgataaagtaaagcatagaataagatgtgacgaaagtgacttatttttgctagcagtttacatataaagcgtaggtacctgatacgggagtttggcagaagcggcattagcggtagttacccaactaggaaggtacacctggaaatgcaagtgagtgtctagatcaatgccctatctatatgttgacactatgtaatagagattgttaaagagcttgcttgctgatttctttgttctttgtcacttgctagtttagcaagagattgggatttgcactgtttgcaggactatatctatgggtttcctatttcttgcttctcactcttctctccccatcttgggcctggcttgtcacatcacaccaagtacccttcaatataaacttcaatcgcattagcatgaaggttataaaagctatttacttgcttttatgaaagatacataccaaggcctaaacagggtgaaattctctatttacacttacctatcattcagaagagccaacatactatctaggcagagcttgacgagagatgctagaagcttacagtaccaagaccgagtttctttacttctatagtctcttttctcttacccttacttgaatgcaatatctatagcattcactggggttcatctttgatacagacttgtcgcaggtgaatgagtgcggacacgcttcccggcgcgagcatcctgtataggggtcgccgctttcatgttggccatgggtattcaaactcgacggatatggttcttttccttggtaagactgtcatcgtccggcttagactggtcgatgatacgccgtcttggtttccaacccccggcacgacaagaaggtcccagcaaagattggtaactgcgcggaaacatatccatgagttcatttactcaaagggtacggcgaagagaaccggaatttctacggaatttccctacaatggaaaggcttgcagccagtaagagtgccaggattctcttcgtggggagacatagaagtggcacacccttgtttcaactgccaggaacttctctcggtatagcggatcagcaggaggtcctccttgatatttactcttactttgatacaaagttggtgagctagcgctctagcccagtgattcctaatataaatttcggcctaggcgttgcccttgctatcctttctctcctcctaattaactgcataatatgtcaggggcttgagacagttaggggattaagagtaaaactatatcatagacagcttgaggggggctttacaatggtaaatccggtacatatagttgcatatatatctcgtgatccacaatcttatcttcagccccagctttctttcttttaaccacctcatctcacctttcataggagtcgccctttgaaactcctagaaggtcagaaattcaattcatctctatttgcaattcctctcagtcaatatcgctcacacttgaataggatgctcaatgatcatgaaccctcaaaaggacacgatgactcctacctgatcaatcgcactcgagtctcgactgtgaatcaatcgaatagaaacgcgaacgtcgcttcgccccccaaatctcgatctcaaaaatccgaggacaagcttgattatgctcaattgaagaaagatgcgccgggcctcgttgctgccgccgcccatgcggcggttcctagctggaccagcatggttctaatggtctctcttatcttcgggggctgctgtgccaatgtgggtgtctagagaaacccccaacgctgctacggagccaaaacaggaactgatcctttacaggtctttgcgctagaggcgattatcaagtaagaaaacaaaccaggctaatccaaacacaacgctaatcctatatcttctccagagaacagcctactgccggtaaggacgacaaccagaaccaatgaaaacaatcgcactgcatatcctaacccaactcgttccacgtacaggtcccttgataacattcgcccaattcgcgatctgcgccattttcaccatcccaaccttcctatccccctcagccggaccacgagctttattcctgcgcccacgcgctatcccactacgctcatgggcggtatataccgcttatttcatgagcgtcaacctcctcaacaactgggccttcgcatacaagatctccgtcccactacacataatcctccggtccgcaggccccgtcgcctcaatggtaatcggctacctatacaacggcaagcgctattcccgcggccagatcgcctcggtagcgatgctgacggtgggcgtggcggcagccgccatggctgacgcgcaatccaaaggcgtatctatccacgtcgagtccgatgcggcggatacaatcacgaccgtgacgggcttcacaattctcgcgctcgcaatggtcctttctgcgttccagggcatctatgccgaccggctgtacgcgacttacggcagagaccattggaaagaggcgcttttctactcgcatgcgctttctctgccgcttttcctgacgagttgtccgcagttgctgggtcagtggcgggtggtggcttcgtcgccttctttgctgtcgcatttggattccgggttgtgggggtcgtctggtacggttgggagcactgctttctcggtgctggggcggatttgccacattgaggctgtcaaggctttcctggcgcatctgccggttcaggtggcttatctggcgatgaatgcactgacgcagtatctgtgcatccgaggagtccatcttttgtcggccaagtcgtcatcgttgactgttaccatttttttgaatgttcgcaagttggtttccctgctcctatcgatttacctcttcgggaacaatttggctggaggtgtcttggttggcgcggctttggtgtttgtcgggggtggtttatatggctttgagggtgcacgtctacgaagcgttgccaaaaaggcccagtgatattatcatattagatagatcttgatctaaatgtctagacaaaatgccttttgcgtgagttttctcggttttaccttagagccggttacttctaggagccatgccacgaatagaggaaaaatatatcgatatcatgtgcaggctgcagtagttgtacataaattgagataaagcaacattgtccacaccatttgagtggaaaggtaaggcatcaagcatgacgcaaaatcaagatctcccaggctaccccggagtcagaccaaaataataaaacagttaaccatctataagacctcgcccacaatcttggcggcttccttgtacgtttccaatagccgctcacacttctctctctcggccttgatgccatcatcctcgtagagaagctcgccgaaaagatcttctttataaagttcgctcacgagtctgttttggaccacatccttgcagtggttgacaaggaggtgcatgacagccttggggacttggtctgcaatggtttctcggacgatgttgaagtatgatgagatgagacggcgaatgagctcggtttcgagcatctcacgttccgtgagtgcaggctccgtgttctcgttgggctgtaagagctgaagtcagtcataaccatctaaaatttaaacaacgaatgcgcagtggtacttacgaatacagagatgtcaccaccatactccgacggtgcagtgtatccctcagtcggcataatgggagcccgaacctcggcacgccgaatgctctggctaatgctcggctcaccagcatttggcccttgccggtgggggttcatgcctgccggtggcatggccatgttgtgagtaccttccttaccgaagaagtagttcaggaacgagtcgcgggcattgttcgagccaccgccaccgaacgcagcatggttagattgactgccattcagagaagcagcaatgccattctcgcctgtgcggccaacatgaggagacatgcttcgcgatcccttagaagagtgggttcggacggggaggttttgcttatcagaatattcttcttcttcaggacctcccgtagtcccattgggagctcccaattccttttgacgtcgcttctcacgcttttttttttcctccgctagcaaggcttttctttcttcgtcctgcttgttctgcatgattgaagacatggcagctgcggcaccaaggaagttagggtggttggtgttaatgtaagctctttggatggagatcaaagattctacataagtcgagcagggccccaggcgctcacgaagaaggtcagatacgacctcaatcaactttccttggagacgagggaaacgcaggagctcttgattgccacacgtgtggcagatcttgataagctcctcatagaccagctccacgcatcgctgactgggtgattcgaggagtttaatctgtggtttgaccagcaaatcaaaggccaactccgggacaaacagactgggacgaggacctgtcgagtttcggatggccgttcggatatcggagacagtcaggttgtgagtgggatcaatggtttccagtgagtttccaaaaacagagttgaaaatgtagtaaatccttgctccaccgcatagctctttcgtagaaatctctgaggaagttccgtcgatagatgagatgaacgacgcggcgaacctggtcatctgctgaagaatcaatgatccccggtgttcttcgccactgaactgtttgtttccgtagctggccaactcttgctgagtctgacccatcaaggtgtttagccgagctttgatatccggaagccggtcacgaatgtgagacatcagggttgtgttcagagtcttggccaaaaagtgcgtaccgcagcggttggccatattccggtaagctggatgatgccggaagaactcagcctctgcccgcaatgcatctgaaagcgattttccacactggatgtcctgctgggaccgattgacaacgccgataaagccaagcttcaagggatacacacgtccagacaggatgtccatcgcattggtgccatggtccatgagatccagctttgacagaacaccgatcgtcctccggcccatgggatccacctgacgggcaagcttcagcgcctcggaattgaccagatcgacattagccggagagaccgcaagaataatgctgttcggcttggcaatatattccaaaatcaaagtgcgtgtttgtttttcaatgtccgacggttgatcaccaatgggcaccttcgtcaatccaggcaaatccacgagcgtgaggttgagcacatgaggtgagaatatcttgaggttgatcggttgtctattgatgcccttgttgcttcctgcgattcttgctgtctccgcttcgatctcttgcttcacttgggcaaagtcatcaaacttgcgtcccggctggtggtggaattcagcccattcgtgttgaccggcaacactggcagccgtgtgtggggtatggacctcatcgttttccggcttatcatcacgttcactgggcacgttgataagttgcaggataaggggccgtcgggtgacaattccgctacctcttggtagaaagtcccttccgacgatattctctaggaccgaagactttccggatgactgggaaccaacaacaacctaagagggaagcggggattagtcttgggttgaccgggtaagaaatgacaattccctctcaacctctgagagctctctacccgactagactcacaatttggggcaagtccaaggaatcattcccaatggtgttgaagaccagatcctgaagcttgttcactgtcacgagcagatcctcgcccagcgatgtcatgatgtcgaattgaaggctggctccttgagacacacaggtaagagttagagcccggagttaagaagagtgaaaaactagtaaaggtacacgcaaagtgaggtcgcgtgcgaacggtcaccgggatccctgaaggcctaagcaactctccttggaaccttggaacattgtttatggccactttttcggcacacgtgatgctgacataagcatgtgctccgatcatgacgtcggtgattcgctggctttaaaacacacatccaggcacgtggatacattgcatacatgttcaaaagaagtaatactacgaggataagatgtggatctagaactacaagacaatgagtcattcaaatgaaccttattgactcattttaattgaaagtggtagtgaactgggtatttatactgaagaaccaaggatacatagtgagatctagtttggcgaatcaatagaaatttgaatttcccctggtcgcattgctggagtcggagtatctacgcatgatccaatcattcgtccaagcgaacatagttggcagggaatagaccttgtttgccattgtactcaccaagccaccagtcgtcatcggggaattcctacaaccgggttagtactgtagatagtgatggggcaaagccgagaaaaacagggattgctccacttaccacgttggagatctttgcatcttcagggaaaccgatctcgttatcctcggcggcttcatagtcatacaaagctgtggccgtgacaccgttggagcttggggtagccactgatggtgcagcggcagcgacaggggtgggtgccgccgggacgggggcagcagcaggctctggctctggctccgcttcataatggtcggaagcggccggtacgtgtgacgcaggttctgtgtcttccacaatctccacatagttggcggggaagagaccacgctcaccccgagtattgacacccacccaccaatcctcgtcgaccatttcaatgtcggtcacatattctccctctcgcaattcaatctcattatcctcggccttctcgtagtcgtactggatttgggctcgcggtccgccttggggctgctcgggctgctgaggagcggttgcctcggccgcagcgcggcctaggtcgtgagaatcatcctcaatttccctctcgtcgggaacggcctcttggaggctccgaacaggcatagcagggggaggggaatattgttcctcgtgtgcatccgcaatactgtcggcagtgccgcggccaaccggcatggcaatctggatcggcgagctctcacgctccggggtgggaggtgtcggggagcgaggaggctgcggtggtggagtaggaagagcctgctgggcgtcatgctcaggctcagactcgacgggtccagaggatagcccgggtacaggaacagggcgactggcctgcggaacaggtggagcaggaggagcgagtggcgcaggcgcgggtgtgggcgtgtcctgagcgaactggtcacgaatagcactcacgtgaggttgtggtttatcctcttgttggtcattggcctttgcatcaacaggttgctcaggatcgtatgatttttcctgtgcagtttgaacgggagcccaggacttgcccgcataggagcttctccactcgctttggccactaggttggctttgaatcggggcaggagtagaggtaggctcagtggttccagatgacggggcgactccgcgctccttggctttacgctctgcccaaatttgagcgggtgtcttgcctccctcatcagcaaaagttcggcttgcagttccaatcggcgcgctcgtggttggcttaggcccgagaccaactgggaggggtggctttgttccagggaaggaggggctagagccaaacttgttggcaacccttggcttgggtagggtggtcaaacgctccgcggcagtagagggcgcaggtcgctcgggcaacgttgttggctgttggttgaatgcagtgctcgatgggacgttgtcattggcttccggcttctgtgctctggctcgaatagcagcgatgtcgactttgccaatgggctcataagagcccttgataattgcggggcgctcatctttcagctgaccagatgcggcagcttgtttccgaattgcagcaatatcgactttacccactggctggtagccacctctaacaacatcgctagaatcatccgatgcagtagcggcaggttggcgactccctgtggggtttgccttgagttcttgtaggttcactctagtgggctggtaagccgattgtaccttttccaattgggtgcgagtcacgggaggggcatctgcaccccatccatcatcattcacaccagctcttgaaggtgtgggcagtacgcgagcagctgggctgggagtgatgcccccagatcgagtcggtgtgaaagcaggcttgctagccacggcaggccggggggctggggcccgggctgaggcctcgcctactgaatacttagagccggaggaatctgccacccgctggacgattccctcgggggttagatccccatctgctcgggctgtgatctgcacatggtatccctatccagccaagtcagtttcaccgcgacagttgcatcaggggaaggaaactcctcacatgaaggaacttggcaactgcagccaggtggctagtaaagtaaccctttgttcgttccggcacaccttctccacaccagccaatgagaacgtttttgggaagaccggtgttggaatccgtcaccttcacataggcgaattgcacccgtccttcggaaaattcctcgatgagatccgccaattcaccctctgcagcacgattggttaatataagataatgggcttggttggtaaaaaggactactaacctccggtgctctggaccttaaggacactctccttacctccatcttgctggaaggcactaacaagcggggtagaaactgagtagacagcccattggccataggtcgcagaccctccgttcccagaagggggtggtgcattcaccactgtctgataactttttgatatcgaagggccattggacgagagattgagagaagccatgactttccggcgaataggcggggagaaggaagggaaagcttgtcaagtttcagatgtgtccacgtgggaggaggggtagctttttcttttgttacaatatctgtatctcatgcagtgtcagcgaaaagcactccagactgttggtgttggggtgggatgtaagttcggggaggggaatagataggagaaggagggagttgacgtaggtgggcatttgtaaacactgaccgggcaaaaaggataaaagcagcggggttgaatgctttcaagatgagaatatcgcgacaccaaagaaaaggataagtacagaatcaagaggaatatagagagaaaggtccaggagaacgatgaagcctaaaggtggagaggagagacgggaggttaggggaaaggtgttataatacgatacttcgtactgccaatacatgcacatgcttcataatatatgcaatgtattatgtactatgtagtatttagggagcatcttcacttcgtagatctatatagctttagaatttaaagcttgaagatgggtattaattctaattcagatattacactctatactctgtatcatatataaaaaatcaatcgtgcaagccttgtatagtcccaaagctatacatacatagttggagatgtgtctattttacgtgtattcttgtgtatgtattttacagctccggggcctggactttcttccccattcttcaccgacagagaggtggggagcttgagctctcgaagagtttttttttcttcttcttcttctctctggtgttctttggtttggagtatcctactttctaattgtgctaatccaattctatactgtccgaaatcgcattgttgaccttgtgtgaaaccccaagttatgcaataatctcatcacaacccttctcagttatacaatccctattcggtacctgggtacacataggatagcaaggggtcacagcagtcatgggacctactcaacccgatttcagtgccagtcagaatgccaacgcgcctgctgattcgtccaacaatgaatcggccacttcatccccaggtctcgaaggtcccgtggactctcctctccacgaaagctctaatgcactagatcagcccgcagaggatattttgcccagagaccaacagcagaaaacggccacctatgactatgcctatgagaagtccatgagtcacgccgaggcaagactcttctatcaacatcatcagctagccgcgcggaacgacaccctgccttcgagcccagtggccccagcccgctcaacattcgaatcacgccttgaagaatcaccgaacctttcggatccaatgaatagtcaaggccagatctctcgcgagggatctatggtgtttgaacacgaacccacaaaactacgattgcaatccgccagtgaacccaatccctctgtgtcacgttacctcgaagacgaccaagacgaggcgaacgattctgcccgaaaccaggcggtgattctagatgctgtccaagggcagggaccatactcggtggcggcggcgagtctgcaaagcgccggtgtggggatcggaggccctcaggttgctagcggatatgcgtctagcagtgatgctgtcacgtctgagctgagtgctatctactgcaaaatcaagaaactacttgatcggcgatcccagtacttggcgctttctttgcagggacccggagatgatcctaaggaccaaccagactgggagatttatcctccgcccccagaaccagcgtgggatcatgagaaggaatatcaccccggcaacatcggtgacccatctgaccttgcaggaaagaagaggaaaatgggccaagatattggggaggattttgacatggaagaattgatgcctctacccaaagaatcgccttggacgtataggctggatggcaacagtgtatatcaggtctttgattctgaaactgctgctgaccaacaaacacctattgttcagatcccctcgttgcgcgatttctatatggatctggacgccgtgatcgatgtgtcgaccgacggacctgcgaagagctttgcgttcaagcggctgtcgtacttggagggcaaattccaactgtatacgctgctcaatgaataccaggagatggccgacagcaagaaggttcctcacagggacttttacaacgtgcgtaaagtggatacccacgttcatcattcggcatgcatgaaccagaaacatcttcttcgcttcatcaagagcaagatgagaaagtccccggacgaagttgtccttttccgagacggaaaacatctgaccttgagagaggtctttgagagtattaacctgactgcctatgacttgagtattgatactttggatatgcacgtaagtctctcatcgcatcccttgttttgatgccgaatctttagaggatgaaggaagatgcagcctagatgcatcaacatttcctctacgctcactcttaagctacaggttttacttttactgactctgacttcgtaggcacacaccgactctttccaccgatttgacaaattcaatttgaagtataatcccgttggagaatctcgactgcgtgaaatcttcctcaaaacagacaattacatcaaaggtcgctacctcgcagagatcaccaaggaagtaatctcagacttagaatctagcaaataccaaatggtggaatggcgaatctcgatctacggtcgttcccttcaggaatgggataagcttgcggcctgggtagtggacaacaagttgttctcgcctaatgttcgctggctcattcaagtgcctcgtctctatgatgtgtacaaatcaagcggcatgatggaaaactatgaacaagttatcaccaatgtcttccaaccgctgttcgaagtgaccaaagatccttctagtcatcctaaactccatgttttcctccagcgagtggtgggattcgacagtgtggatgatgaaagtaagcccgagcgccggctgtacagaaagtaccccatcccccgggagtggaacaccaagcagaatccgccttacacttactggttgtatttcatgttcgccaacatcgcttccctcaacaactggcggaaacgccgaggattcaacacgttcgttctacgccctcattgtggagaggcaggcgacccggatcatctggccgtcggcttcctctgctgccacagcatcagtcatggtatcttgctacgcaaggtacccctcctgcaatatctttactatctggatcagatcggcattgccatgtcaccactaagtaacaacgctttgttccttacatacgataagaacccctgcgcgacctttttcaagcgaggactcaatgtgtctttgtctaccgatgatccattgcagtttgcattcacaaaggagcctctcattgaggaatactcagttgcagcgcagatctacaaattcagcgcagtcgacatgtgcgaactcgccaaacattcagtcgaccaaagtggatttgagctttccctcaaagaaagatggctcggcgcgaattgttccctgcctggagtcgctggcaataatgttgcaaagagcaacgtaccagatattcgtgaggcgttccgacatgaaacattgctgggagaatggtccttgtaagttgcctatcgtgcctttgacgtcaaagaaatgagactaactgtatatcgtctcatcaggatcgagcgatatgccgacggcaatgggaccggagaacagaagagcttggttccaggtccaccaggggaatcggtgtcctcgaatcatggtaaatctatcttaaggaattaggaattatgcggccgactgactttgaaattcttagatcacaatgcacctaaccctgagccgcaatctgagctaagttcaagtgtagctgacactactgatgcctcactcagtgaggcccatggtacagaccagacaaccaccgctccgtcgactccatcgacatatgtagctcgatcacctcgccttggaacgggtgagttctcgtctcctggcagtggaacaggagtcgggggatcagacggtctgccagaacagaagattttcccaggaatcgttcatgagagggctcgaaaggggactatgcaataggattacacgtgagcggctttacgtgacacatcacagactaaggggagagaacaaaatattggggtaattctaatgcaaattggctcctctatcggtcaagttaagaattcaagtgaccgtgacccggtagtagagtaccacgggcatgctacacatgtaaaatgccgacctctatcaaaaacccaagaacgcctgaagaaacagccacgaattcaacatgcaccacacgcacctcacgcacccgtttatgtcaatcaaacaccaatgcacgcctctcaaccgtaacatacaaattagatgtttcaagtacgtacttcaaatagcccagctgccctttcgttctggcattccccagccttcaggattgggatcttctccagtcataccaggctcctgcctcgcccattcccggatgtatagacggagcgctttccatcgtgcacaggcattcgcaagatcatccttgtctggggctgcaacatagcctttagcatcagttttcaagtcgtcccgacgaagagcctcgacgggaatacccgagattttgctgagttcgtaatcataataacgcgcaagacaagggtaacccagagacaagtaattataaatttgagtcacaaatccatcatgaaattcggactcgatgactttctggagattaggactcgtgggcttccagggactctgatttctgggcgaggttgcgagatgattcagatgtgtatgtgaaggagatgggctgagtcccatgctaatgccagactcatcgatacgaggcatgggggtcacaattccggggaacagaccgtgcccctcccgctcttggccctcgtctttgcaacaagtacccatccaaagaccagaaccctttccgccgtcccgaggaggcgatgcgtaccataagtcaccacagccagcacaaagatcatgtacacgagaaatcgcatcgaggctaaagtggtcacatattgttccctcgggtgaggcgcatcgaggaaggacgatgtccctgccaagcatgggcgggctcttgccattcttattgagttgtgatgaagattttcgttttccagatgcagccatagcccggatcctcatttcagcctcctccttgtggtggcgcatgtagtccagttcccaagacagatccgccgaagattgtcgtcgggacttgacatgatcataattaggcatatgacaatcgccggaatctccactatcttcctcgatggcgaaatgatcaacaggctcgtagacttgctcgttgggaaaggcagccaacgcttgctccttcaactggatatgtgcggattgagcggcaagagagagcaagaattccgaaacctccccattgggagttgcacggagtggcttgcttgtgcataaatctcgtgtaactttatgggaaggcccgggcggggaagtgcacgttgaatgcgatctggagttgtccgaatcttcgctgctgtcagaggggatcgatggaagatccggaactcgaaacgagtgtcggcgagcttgatgtcggcgcagaagattggaagaagaaaactgagattcggatggcagataagtgaggacatgggtatttatatctgaccatgatgttgtgtctggggaaatgattgtatggggtgctggagatcctacggcgttatgccgtttgggaaacgggacaggttcgctctttcgaacggagcgggtctcagtttgtatcaattcgggtttgaatcttcttggagccgttgatgtctgctcagacgacgtagagttcctctcatctacctcagaagtcgaataagaccgtctcttactagtcttgcttgtttcaattggctcaggtaaaaatcttctggtcggttgatgtttactagggtcgtttgaatgtgtttctggctttgatggagcgggttgatttactccactcaaagctggctgctggacgttggagcttcgtgatacggtctcgattggctggggtaggaatctccgagggacccttggttgtccttgactttgtgcaagaccagattcttgtggctggtatcgactatccaaagaatttggctggtccccgtgaagagtaatcatatctcgagcgttgtctgtaagttgactcgcctctcttccatcctccgtgggcatgttagatttcccatgtgcttctggtggatggcccattatcttatcctcagtatctcagctctgaaccatgctcgtattgaatcaagatggttgacagagcataaccattttagggggttcaattaaggcacactgggtgtgtgttatcagtgggtttattgacgggcatgcggggtcgaaagagcggtctcgatgtgactagtagagaaacgaaaagaggcgtaacggaatgtaatgtatcagttatcatggatcgatcaaagaggcaaagtaacccgaatatgttcagaatgtacagtgtatcagaaatgcattttgtaaaagaagggaagtgcacatgtgagaagtggaaagttgtggtaaattccatacaaaacagggcacgtgcaagtaagttctcggccgcgggtaccttttatgacatcagctcttccagggttggctgttacgagattaccatacgcgataagggggcgataagataaaagtcatgaatgtcctcttcgatttcttttcctatgtctagtacagcaatggaatccacagacaagcggaaatttgacgagactacagatgattctcaacctggatcggtcgcgaagcagcggaaggtaatcggaccttctctcccgccacctcaggaggccgacgcggcgagtgaaactagcagagatgatgatgatgacgacgacgatgatttcggtccaagccttcctccctccggtccagtgagctctgtacgacaagagtccacggctcctgatatatctaaatcggcggaaaaggaaaaggaaaaccagcgagatcaatggatgctgcaacctccttcccattccgactggtcttctaaggtcgaccctacacaactacgaagtcgcaagttcaatacaggcaaatcagccacggcatctaaggatctagattcctcgtgggttgagactccagaggagcgaatgaggcgactacaggatgcagtcatgggcgttgctgcttcaaaaaaacagcccggggactacaaaggtccttcaaacgcaaagatgatggaggatcaaatcaagaaatacaaggtaattattgggatatactttcctcggaaatttcatactttattctctccgcgttcttcattttgttctaacatacgtcttgtaggagatgaccgggaagaccactcgcctagaaacccaagctcaggcaccggaagaagaggatgatccaagtgcgcgcgcatttgaccgagagaaggatatggcagttgcttcgaagatatccagcgcgcagcgccgggagatggtcaagaaggcagcagattacaacacacgttttacaaagggcagcttcttatagccatatttcttgtttatagtttgaatacccaagactttaggaaagattacaaaaaaagacaggccgcttatgcggcagaccattttcatcactaaattatgcatatctttcatacggagaacggagaactctgcgatctaatcttcgcccggttatccggctgactcggagtggccaaagtgcgggttgtgtcaaccaatcaacgtcgctgatattcaccttagttatcctcctccctaattcccttaaattccacctctggatattccgttgttcctactcatctgtcgtctgtctttctctcaaccatgtctttctcaaatctggtctccgatattgccttccgtgatgctcgtgtggatgatggcagctcccaaatctcccatgcccgatctcagatgtctcgtgcgaccgctcggtcgtatgccagcaccgcagccacaagcataagcatttctggtgaagtctctagccagctacatgctggctacagtcatcctctgaccagagcatggcaggccgataggcaattaacaaaggtccgccctcaatgatgttatgaaatccataatatgacacacttaatcgcactggcaactcgtcgctaatacattatctctgcaggatatgcttatctatcccttgttcgtcacggacaacccggatgaggagacatcgattccttcgttgcccaatcaacatcgtcgtggaatcaatcgcctggttcctttccttgccccccttgttagaaaggggctgcgctcggtaatgctgtttggcgttccgctccacccgtccgccaaagatgcactgggaaccgccgcagatgaccccgatggtcctgtgattaaagccattcgtcttctccgatctcgtttccctcagctttatatcacagccgatgtgtgcctttgcgagtacacatcgcacggtcactgtggtatcctacgagaggatggaaccctcgacaatgggcaatccgttgaccggatttccgatgtagctgttgcctacgcggcagccggagctcactgcgtcgctccatcagacatgaacgacggaagaatccgagcgatcaagctcaagttgattgaagccggtttagcccaccgtgtacttttgatgtcttacagtgccaaattcagcggctgcttatatggaccgttccgcgacgcggctggctcctgcccctcattcggagatcgccggtgctaccagcttcctccgggcggccgcggtcttgcccgacgtgcaatacagagagacatggccgagggtgcagatattatcatggtaaagccagccagcagttaccttgatatcatccgggatgccaaagatttggcacacgatcttccagtggccgcctaccaggtcagtggtgaatttgcaatgatccatgccgctgccaaggccggtgtcttcaatctcaaggacatggccttcgagagcaccgaaggcatattgagagcaggcgccgggatcgtgatcacttatttcgtcccggaattcctcgactggctttagttgtttattcaacttgattttaactgctacatttctccactccaaaagtgcgattttcgggcctcatattttccgtgcgattaccatgactgcatttctacatctgacatctatctatggtgggtctgatgtattgaatatacaatgctacttgaaaactggatagattccccttacgcgatatgatgttttcttttctgtgtgttaacgattaccctttattacaatgttattaatttcttctttttcggtgcaaccggcctcgggatagtgtagcagatgtttgatttccaatcgacattaaaatatgtagcagaatcgagattggattgaggtaaacaggctaaataatgcagaaacattgtgtataaactgcaagatgaccccgattcgccgcacagaacgctaataccatacaaattaaacggaaaccattcgtcagggacagtggatatcgaaatcaaagacaagatcagtaagaaagagacgaaataaataaaatcgaaccggaggaagaaatccatgcgagtcataattttgctctcccacatataggcgtgagtagaccagcaccgtagcgtaaggtaattggacatttatacacaaatcaaaaacacgtcacttcgttcacatagcaaagctgggttttgacccctgaaacatgtaacctgcaatgttcgtgttgacaatctctcccggggcgacgtaaaccccacgagcaagacgaactccggggtagatgatgcagcccgcgcccacatagcaatcttcttcgatgatgacctgacggccttggtaccgactttgcgagcctttgcgctcttgcatgttgggatgagcggttgaactaattattttgacgttggggcctatccacgtatgggcaccgatgcggataacacagtcatccacaaacaggcaattctccgagatcatgacatcttccccgatatgaatattataaccataatggcaactaaacggagcttcgacgacggccccttggccgatagacccggcagagcgaggcgcgttgcttccggctgggggattgacaatggaagatgccgggggtacgatgatctccttcagcaggcggttttgctctttcacactgacgccggtgagcggattgcaggcgttgttgaatttccacagtgcgcctcggcaacgatctctttcctccacgaggtggacgtcaaagggtcggtagagtttgccgttgatcatcttttccttctcggtctcatcgctcgggacggtacggcccgagagctgatgctcgatgctgagtgccatccgagcctgcgcctgcggactatgggtgtccacagttgccgcgggcaatgttcgctgctcattttggaacaagggcatattggatttaggatgagatggatgactgaggtctcgaagtgaggacatgaccggatagtcaggtttgggacgtccctcccgcgatagctcatggatgggtgggacttcccggtaatcgacgacttttgctatggattcggatggataagcggggagaccggcattggacccggaccccgggccggcgcctggccaagcttgttttgaccacgcatggttggatggtgtatgcgttgggctggtgttgtattgttgaacagggcggtcattatcctccaccactagaggcctgattttggtcgcgtcgacatgttccactaagttgggttgtcgctcttgctgtcggggtacttcttgcatatacaagccattgatgtctgaatagccttctttggattgcaaagggatcggggtttttgtactagatggcttttgccaggtgcttcgggatgaatagccttcacacaggaagccgccacgaagacagttgttgcctacaatgcatcattaatgtcgctctttcggtagaatttggacagggaataatttgtacagaaaagaacgtgggaattagagccattaggagttgacttacatgccggatgttgctcgtcgcatttcttttttctgcgacggcaggtcatacagcccgtcttcgttcggttactaaatacccgcttcctctttggagccacctgcattgccccatgtcgatctggtgcataactaggagaggatggctgctgagcgcccggggtcgagcgatttgtcatagatctttcctgacctgtctcgcgttgaagagcgtctgctaggtgggcatccgatgcatccatttgctgggcccgttgggcctgggtgatcagctgagaatcatattctgaccaaggactattggcggaggtctggcccgcatcattgccctcggaccggtgagatggggttgccgaatgattaccacgctccatctccgaggtcgatcctggcacgctgccattcggattggtttggttgctctcggcaggacgggtcaccggactcctggaggcgttcacggaatctcgtcctcgggactctgatctctttctcttattcttgttgtgagagccactgggggaagatctttgtgaccacttctcttggtcattggcaggatcatcccggtcatcgcggtgactaggatctgaggtggtcttttcttgggtcggcgcacgttctccattggggacggaactgggaggtggaccattcccatttccatttccatttccatttccattcccattcccattcgcattgacaggagccaccgtttctctgccattaactgcagtaaatcgggatgggctgtgttccgtccccgtttcggccccagagtcgtgagtaccagtcatgacggatgcagcaagagccgtcattgtataagccaagaaccagaaaggagaaacccgagaccacgaagaacagggctgaggttacaccgagaggtgtaagaaactattcaagtaaagggcggatataggcaagagttgtagctcaattgccaagcaatcgcccccaaatatgagggatagtctcaacacgcagagacccaaagctttcaaggttcctcaaatacttccaatatcttaatcaacagctctgtgttggggttgtttgcgcggaattgcaagttaagtcacccgcgggtggggcgaggagatcgggagattatcagagatagtatacaagatgggttgaaaaaaagagcattcaaccaagtggctttttttaatagaaagagagataaaagaaaggatatcaatgagaaagaagtagccaagggctcaaatatatagagtagacagagagagagagataggtagagagagagaaagccaaaggtgaaggaagagacggaaaatgggggagacgagggaggggggaaagagactaataaaagagaatggggaaaacaccgagctaggaccctctcactctctcactctctctctctctctggcaagaaaagtacaaataaataataaataataaaaaagagtaatctccaataacttgacagcaaaaaagagggaaaggggaagttggcgcgcgatcggcaatgacggcgtcacacgcagcaccaatcggagaagcgatcagccgtgtcctagtgaggcgcgggtctgagacatggcccatccgctttggactcttttctgcgcgcgttcccagtctcttcccctctccgatttcttttttgcccacattcgccattgccgcccgtgtacgcggtgtcccgcgtataagggcggttatgcgcttagggagacgtcgacttttggtgccttttttgagatggatttaatggcaccgtggtattgaattttcgccttgaaataatattctgttccttccccctaattcttcccaacacccgagtttttcaaggacctggcgcccatctcgggaattattgatgactgcagcgtgccgcggcgctaggaccaaatcactagaggagtcggctgagcacggatacctcatgggcgctttgagtgagtttacttttctttgttttaatcccaacttcatattctggacggcgtacggggtatactttcatctattattataccgattcgcagcatacggagtatacggagtatatgggatatgtctatagatattatacattaggtgtgtataaattgttggcacctgattcagcccaactctcagaatcccatcactatcactatcacttttcgcataaaagcacctgtcataaatataaaaaataataaatatccaatgtgatatcagtgcagtgtacagtcgttggccggtgattatactgggtaaatgatccctgggcggtatccccgggcggtgggggatcgcatgctgactaagatctcaacagagggatcaagttcaaacatccaacgcgctctcaccgccagagtctacgatagcttccttttttgacccccaattttcctgcctgttttttttactgccttcagagtctggtaagtcttgacctggattcacctcctctagtcccccgtccaatcatttctcatcctgacatcgtgctgatcccccaacccctccaaaggatctctaccccaccgaacacacttgcttcttattcccctctatcatttgatactgccctgcagccgccctggcaataccataacctgtccaggcggttcccatcatcctcccctcttgactctcgtgtctcaaaccctattccgtcatcagaggcgatatcgccagtctgcgccgagatgtcgatttcggtacaagagctggacaacacggtccgagctttgtttgaaggcaaaggtgccgtggtaagtcgaacctgtctcctctacacggcttgggtcgcagaattcatggaatctgtgtatcctccgtggagctctggggacaccaacactgacattgagaaccgtctagcaaaaccaagcacagcagactttgacagaagtaagcgcatagcccctccacaacgtcatatgaattgaacactaataatccctgtgctattagttcaagcaaaatcccgatgcctgggtcaccgtgggcaacatcctccaagaggcttcataccttcaaaccaaatgtgtgtcttgagtctttggcaatctcccttgtgcctggaaatgcctgggaaacacttgctgattttcacagacattgctctccaagtcttagacaatgtgattatgacccgatggaaggttctaccaagagaccaatgtcagggtaagaactacatgcattgacctcgtcgttttacctccccatactaagaacgttcttcataggtatccgcaattttattgtgcgattcattctcgaaaactccgaatccgaagagaagatccaagcggagcgccctctgttgaacaagctcaatctcgttcttgtctccattttgaagcaagaatggccgcacaactggcccaccttcatcaatgagattatttcctcttgccatgccagcctttcgatctgtgaaaacaacatgacaattctccgtctgttgtcggaagaagtcttcgatttctcgcaagaccaaatgacctctgccaaggcacggaacttaaagacctctatgacctcggaatttgcatcgatcttccaattgtgctccgaggttctcagcactgccaaccagcccagtctggtgaaagcgaccctcgaaactctccttcgatttctgaactggatcccgttgggctacattttcgaaacccccatcatcaataccctcctcacccgattcctaggagaacccgagttccgaaatgtgactttgaagtgtctgactgagattggtggcttgcaaattggcgctccttacaactatgacgaacgattggtgcacatgttcaccgagaccctgaccaccgtttccaatgtcattcctctgtccttggacctgaagcagacgtatgccatgagcaatggacgagaccaagagtttgtatcaaacttggccttgttcctctcgagctttttcagtgctcaccttgatgtatgctcccttttcctttaaccatgtttttttagtctgtttgatgctaaccttttccttcttttatagcttatcgaaaagttgcctaatcaagattacctcacgcacgcacatttctatctgattcgggtcagccagatcgacgatcgggaggtgttcaagatttgcttggactactggacaagactcgtgcaggaactttatgaagagatgcagcagctcccaatcaccgacatcaacccgctggtctctatgagcgttagtggtttggcgaacggtggtgcccccaatcctacgaccctagcgaactacccattgcgcaagcacaagtacgagactgtgttaacaaaccttcgcaccgtgatgatcgagaagatggtccgcccagaggaggtcttggttgtggaaaacgatgagggtgaaattgtgcgcgagttcgttaaggagagtgataccatccaactttacaagacgatacgcgagtgcttggtctacctgacccatcttgatgtggtcgatacggagactatcatggtggataaattggctaagcaagttgatggaaccgaatggtcttgggtgaactgcaacacgctatgctgggctattggttcgatctctggagccatgaacgaggaaaccgagaaacgtttcctggttaccgtaatcaaggatttgcttggcctcacagagcagaagcgcgggaaggacaacaaagctgtggtggcgagtaacatcatgtacatcgtgggacaatacccccggttcttgaaggctcactggaagttcctgaagacggtcgtcaacaagttgttcgagtttatgcacgagacgcacgaaggtgtccaggatatggcttgcgatacgttcatcaagattgccaacaagtgcagacgccatttcgtggcacttcaacctggtgaaagtgaacctttcatcgaagaaattgtacggaacatgaggaagatcaccatggacctttccccgcaacagattcataccttctacgaagcttgtggctacatgatttcggctcaaggtcaaaagggtctccaagaccgattgactgaaaacttgatggcgctccctaacaccgcctgggatcagattatcgcggaggcaaaccaaaacccggcgattctccaagacgccaacaccatcaagattgtcggaaacatcatgaagactaatgtcgcagcttgctcctcgattgggacctacttttattctcaaattggtcggatctatcacgacatgttgaatatgtaccgtgctgccagtcagctgattaatgatgctgttgcaagtgatggtaactaatccaattcacgctgacggacaccgaatttcttactgacacaaaaataggagctattgcacccaaaacccccaaggtccgaggacttcggaccatcaagaaagagatcttgaagctcattgacacctacgtggacaagtcagatgaccttgagatggtcaatgctagcatggtaccgccgctcatggaggctgtactgatcgattatgcccggaacgtccccgatgcacgcgaggctgaggtcttgaatgccatgactacgatcatccacaaacttcacgtatgtttttcgccctgctgattattggtgcccttatttgatagcctgctaacatgtcaatcagaatctgatggaggataagattccagccatcatggacagcgttttcaactgcactcttgagatgatcaacaaggacttccacgaatatcctgagcaccgggtcgagttcttcaaattgcttcaagctgtcaacctgtactgcttccaagcacttctgaagctcgatgctgcgcagttcaagtttgtcattgattcatgcatgtgggcgtcgaagcatgacaaccgcgaggtggagaacactggccttacgatgtgtttggagctgatgaacaacatggccgaaactgaccagcaaacctcgagcattttcttccgcgagttttacattccaattcttcaggatgtcttctttgtcctcacggatagtgaccacaaggctggtaagtaatgtcctttgtccggatatgaagcaagaagctaacaatccgattttttaggattcaaatcccaggccatgcttttgtcgcgcatgttctactttgtggaatcaggcaaaatccagcagcctatctactcccccgagcaagccccgcctggaacttcaaacaaagaatttttgcaggagcacatcgcaaatctgctacacaatgcattcggcaatctccaagagtaagctccctcggcgtcggttgaaaccatgcaagagtatactaactttctccaccagagcacaaatcaagcagtttgttattgggctgtttttatacactgatgacctaaacaaattcaagactcaccttcgtgatttcttgatttctctgaaagagttttccgatgacaacgcggagctgtatgcggaagaacgagaacaggcggtgcgtgatgcccaggttgccgagcgtgaccgagctatgaaggtcggagggctgttgaagccatcggagatggatcaggaggatgagctatgactggacgaagaactgcgtaccgaatttgttgttgcctctactggttcccctgggcatgagcaagaatcaaggttgacctctcagaacgacagccttgacggctggtccttctacgagctctagctcatgggaagttatgtgccgctacaacaaaggaagcattgctctggaaagatgtgtgtgaatctattcttttatcttttctttttatcccccttggttggctatcgggcatgcgagagaccccttccctgtctgagcgggttctttgaggttggtgcatcaacacggaacggatttacccattttgtcctacgtgttctctgcctattcaggcgcgagcttgtttgatagcttttaacgttaaatgattaaaaaaaatctccaatcaaaagatacaagaataattggccgcttgtggccttgtcatctctttatggtagttagagtttgtttaggtatcttccttctctgatctatagctagacgatgaaaaaggcgaaaatgactgtaaaccgtacagacatttctagtataagccgggacatactggaaccgtcgcttcctacgcgacatatcgtacgttaatgtggggagatcggaaggcggtgaatccttatcagttgcatcatcagaaaaagtagcccccgggccgccttcgcggtgattctattctacgattctttgattccttgactctctaagccacatcactctattccatccccatcacaatgtctcgaacacgccagccaattgcttcgaattcattccaaaccacgacagagtcctcagactcctcaacagcccacttccccccaaccctcaggctacgagccgaggaagcaactgacaccagcgaagcaacatcgtcatcccggcgaatccgatggagcgaagatgtcatagacaacgagggcatgggcaaaaagagctcaaaaggtaaggatatcatacatctacatctattccatctacccgcaatgactccccaaaaccaccagcaacaatctaaccgccaccagtatgctgcatctaccacaaagcccgcccagtgggagaaagtagctcagaagagtcctcatccagctcatccgaaagcgagagcgagagtgaagacgaccgtcgcactgccagagtcaaccgggctcgccgcgcacacccacactccggagaccgggaaccgcacgacgagcacgaagggtgttgtcctgaggaccacggctcaaaaccgaaacgcagtcgcaggaagccgagtccgaatgcatacgagaagatgcctaagccgtcgaagagccagagtcagaatcagaatgagaaccaggcgcggggtacttgatctttattttatgggggggtggctttttgattggcaaggaaatgcaatgcgtgataaggcggaactgggaaatgcctggggattcttggttgggtttggtttgggtgcccgatgcacggccagacgaatcatctagggttgtatttcgccatgtctatgcgcggtgtgtatgacatttgcacgacgctgggacggagacaccccatccggtcggtggcatgcaggaaaatgtacaatggcatgatcgaagagtcaagggaggacatgccgaatccatttccggcgcgccgcattgggcgtggcgggtgaatggtcactgcaagaactacttggtctacttgaaacagatagagggaattgggtagacaagttaatgaaatttgtattaagaagatgtggaacgcagtgagggggtatctgaaacatagctgcagcccggtccgggctataatgattgtactccgtacataggcaaaggataaagaaatcctgttccgaaacgctaaagtggactttataccatcatgctttttctccttgcagcaacacgctggccacgtctgacatcgctgtccattgtagaaccgtttggccccggtccaaatgagtcttcatcttctggagagtcgccgtttggggattgtggttcaccctggtccgtgtcgtattgtgccatgtctgcagttgtatttttggggtttgacgagtgacgtcgaggctgacgcctcgaattcaatggtttttgtgatacttgggccgagatatctgcgaggctatcctcaatctctttcttgaggccagagcttggtttccccacatcggggtcgtcctttggggctgacgacgccttgcgttttctccgggagaccattgctagcaactgatctgaggattcatccacggtaaacagatctgagctctgcgccgcaagagtgaaatcagcagggagagtaccatgagactgggtgttgccgccctctccgtccaaactttcccggcctgcctggaaactggaggatcttcgcgatccaagtgcaacagcatcgatcatttccttcgtagggcggcgcatcttgtcccgtaggttaggctctgcatagctaaccacagcaccacgacgtcgtgaatgccgagtggcagactcttcctccgtcttcattgtattcggatgcggtgactgttctggctggcgtgaggcaggctcttccacctggggaggagcagggcgagcgcgcttttctttgtttgaagaggcgcttctggacactcgcggcttttgattgacagtgttaccactgagtttgtcgacattcttaactttctgtggcgagttgctattctcgtcgcccttggtgggcctttgcataagcttagagtcctggtacgaagacatgcgggccttcttcggagagcctagattggaatttgcactctctgttctaattgttagctacactcattgtagagatgagaaagtagaacatacttggctcgaggaccctccgcatagatagaacgggggttcttgatcctcttgttagtttgacatggctttgagtgggtgactggtctcgctgtgtatcttcgaatgggatcgtttgcttttttggggtatggctgggccgggtgaattggaattcgtcgtcgtcgacatcaaggttggaagtgaacctgtcatcgtcttcgggtacgtattttcgcttcgttgaaaccgatgttgtgtgctgtgttgtatcgatgggtggacttggttgccgatctgtcggcggggggctaatttcaggcgcaacgatcgaactcgacctctttttcttcttgcgtgtctcgagagttggaggaaatgatggctcgggttcttcgggtatatcgttgtttatttcggtcctgaatgttgattctggtggtgatgggcttgaattttcgatgagtgcatccccttcctccggcataaagctgaatcgaggaggggagtctagaatactttggtcgtcttggagcaggctgtcaagctcttggggcctgaataagatgttagcaatttggaatgacccaaaatctcgaagattcttactccagagtccgtcgagggtaatatttgtcctcaacaatggcaggaagccttccatcttcgccttccatgtcttctgtcctaggtctcgactctgccgcctgttttggcctatcgaactgtgtgtcgcagagcttgcccaccttgcggggtaatgagcccaaatctgcggccaaattgctcaactcggctagtttggcatctagcttggatttgatgtcgtatattccattgtgcaacattttccccgcttccagtcgttcggtttcctgggtaagattgatgacctgttttcgaagcgacacattttccgaaattagatgtgatacttctgactctaggctgcgaatacgaagagattgcaaggaattcactctcgcgatctcccgattttgtcgcacaaatcgtcgcttcactggatagaaaacaaggaggccatatgtcaactgctagctcaaattttgtagtatagtagtaaattgcacgacttacacgcttcaatggactcagcaggagccgcatagtcattcaaccgagccatggcctaggctggaggggatagcgaccaccgcgtaatcagacggattgagagacaatcctggtgtgcagatggaatgaacttgaatttgatatcgagtccacagagtacacaccaggaaatgacgtgtgttggggcgagtcgtgagtacggggatacgaagagagacgagaaggtaaacagcgacgaatgccaagcccttgttgacgtttgtccgcatttggtttagcttgcccgttcagtgtttggatgactcagcgcccctcccagcctggagccggggtcatttaggcagcttactttgtagagttatccaacagccctagaggtacagactttgacagatcgcgttcttcacacctcgtactgttttgtcgttccgctcgctacacatctcccacaatggcatactcctcacggccaagctcaatgcttccaggcgctccaggtggctcatctatgcgccagcccggtggttcgcaatcgcagcaatcttcggcactgtcggcccgcattgcagccaaaaaagccgagctggagaacctgcgagagttacgcgatctgagtggaaccttggcgattcagatgcaagctttggataataagatctccacgttgaaagatggcaccgaaggttggcctatctgtttctattcgaagggctgatcgctaactacctgttttaagctgttgcgtacgtgctttccaactgggataatgttctcagggccatcactctggcttcgagtaagcgctattttcttacattggaattctacaactggtactgattttatcctgtaataggcaaagcaggcggactctacgaacccgagtcggatagtaagaatgtggaaaaacgaaacgatcctcgcctgccatccacgctggttcgcattccagccgagccacgtgataagactggcgagtgaatcagtcccttcgacttcagccacccggctgaagcaccctggatgatatcatcttttgcggcacacccggattatttgtggctgaaagtttgataggtaccccgtgggttcgcgatattctccggttatcttcgcgctcatgtgtatcaggctacgtaggacggcgtacagaatcggcgattgcctttgagaatgcactcggacctacttggctcctgtcacagccaatgagcggccttgccctcgaaaaaaaacactatcagaagaggcgagttcatggaggcccaatcatgggacttctcgtcatctgtcgcagaaagcgcgatttaactgagaatccacgagaatccgtttctcgcgtgaccagctatgcagagtttggcgcatgcaataaagattgttatctcgaaatggcagacaaatcagaagacagggattaaggagatcatttatttttccccctcagtttagttccttttgaaacttctgcactactgcaaagatcatcattggtaccggaatagatgcacagcagggaagatgaatggacgatgatgtgattggcgggtagagggtagctcaccatgtaccctgcgtactatccaaggggatagttacaagttaatagagtctaagtttttcttccggcatcatgagacgggacgcagagctaatggcgctatgatgccgatccgcagaaaagtcttattaccagttcgaggttcctgcagattttaggggcaaaaaaggcgaacagactctctagcgtgtgttttagtgtctctctagtggctagttaggggcctacacaggtacgtctccggagtggttatcacgtatttcaggccattggtacctgagggggtacttggggcagaagtacctacttatcggttgattgctggatagctgatagaactatataacgttataagaagtgcgatacctagatatcaagtacccccatccgtatcctgcgtatcatcttccaaggttcttttccttaagcgccccaagcacgactaaaatccaagccccctcttttccctgagcacaacgtgcccttcggattcgacatgcgcgattatctttccccgcaatagccgtgtggcttttgcactttggccgctgcatgtatttatatcgatttgtctttcctcattccattgcgtggtatggcatgatcgctgtgtgacacttcaacaatgtcaagtttgatgaggtgatctttaggcttctttacatcttacctttcttacttccggacttttgagctttgatctttccattctcttctatatacaatcctcattatcctcactatctctaaatctaaatctctcaatcttgcaaccttgcaaccttcaacgttacaacattaccatacaacattacatccaacttcaatttcttgctttacctacctcaacccgagaacatacatatacaaccatgtccactgaatggtctttggacttctgccttgtctgtgaccgtcagaccttgggcgctccttactgctctcaaacgtgccgcctagccgaactggatgagacatccgatggaatgtcacgaagatcgagcgcatcgtctacacattggtctgagatcaaccaggcccaagctcaagtcgaggccgtcaatgcccacccccttcgaaagctatctgcctcctcctctcaaacctcactctcttcgctcaagagcaacacccccaattctcccaattcccccaatgtggccgatcggctccaggatgaattgcgtgattatgcatcttgcttcgaccaagtccgcgacctgaaacggcgcatgaccaccacataatttcaatttcaattcgaacccaaactcaaactcgaaaactgggcttctcgagcccatcctcccacatctggtggtgccgagggtacccaaatgcatgcagccctcatgctgcttttctgctttctgctttctgctttctgctttctgctttctgctttctgctttctgcttttgatcatttgcatacacggaaaagaggcgttgtttgaaaatatacattattgcgtctatgtttacggttgttctttctgtttttgtggatcagccttcccacttggtctttctcacgaacctatacccccccaattgttatatatatcatgatcatcggaaggagttgaatccaggctcaggtgcctcacctaattagttatctaccagactgcctataatcaaattggaattatggttgatatttttaagaaaaaacatcttgatgtctttagtaggtctctaccaaagcccaattcgtatcccccattgggtaggttaagtgcgtcatgtcaatttcccacgtcagtcaatgtggggaccctgaggaatgtacccgatgttaaccgtccaaccggggaatgctagatatatcaattagaaccactcctcgacccatcgacaacacaccaaatctgtatggagccagcaattcgagatgcaagcgcaagcacaagctctagcccaggaccgccatataccctttgaacatcccacggccggattcggctctgtgcagaagcaaatgccttcccgcccaacttgctagatacattcactgcgcaagagccttcaacagcgccttttcattcttcggcacaaatcgaaccttgtacttttgaggaatagccaccaaactagtcggatccgagttaccccgaagaggatgacagtctgttttatcatgagattccagacggaagctgttcaaggtccggatgaagacgaggtagagctcgcgattggctagcagcgaaccggcgcacattcgatagcccataccgtacgtaaaaagaggtgcgtcgggctgctcgagccagcgctcgggacggaactcatccgggtcagtccacacgtcggggtctatgaaggattagatgtgttggatctattgccagatggatatcaagttcgactcacccatgttgcatgcccaggcattcaagaagaagaccgtgcccttgggaatggtgattcccttgtaggtgatatccttgatggaggtgcgaggaagtgctaatcgcagcacagtgaagtatctcaggtatatggttagttcaaggactattcatagctcatggcagcgatacaaccggggacataccgaaggcattccttgaccagagctgcaatatacatacacttctgatcatcgtcagaagaacacatgggatcatcctcgccatacatctcctggattgccctggccgcccgatcctggatatcaggacgctgagccagcaagcccagactccacgcaaccaaagtggtgacagtatcaagaccacccgaaagcatggtcaagctaatcgacgtcaactcctcactgttcagcttcgcctctttatccagaataacattagcctggatacaaggcttatgtgtcccctttgccatgcgctcatccaaatcactattcagcgcaccgaggtacttatcacgacggattctcatctcggcggctttcttcgaattggaactaaaggggttcaaccgcagaagcgggacataatcctgcaggtttccggtggtgcttcggaaccgactgatctcttcttccacctcggtgatctcatcgaacaggtcctcttcctgcgaggcgatgcgcacgccccagttcagagtcaacgccaaactcaagctcagacgctggatcatgggcatcgggtcgacgggtgtcttcccgtggtttccgtatcggtacagctcttccacgaaggactttgactcgacatccaagtgtgtcacgtacgtgtcgacagaggggcggttgagggcagatgcagcgccctttctacgtcttttcagggactcactatagggcgaggtaccgatagtcgttccggcagtattggaaacaatctagtcaagtatggtaagtttcagttacaaaaggcacaactcctataatcaccttatggaaagtataagtctcaggcctagagctcaaagcctgtgcattctgaccgaaaagcacctttgccgatgcagcagagttgaccacgacgacggggatgttccccagctggatctgataaacggcgccgtgcgttttcgaccagagccgatactgctccgcggcattggtgcggatctgcgccaagtttccaatcaatggcaatccgcgaggacctttcataccctttacgcgggcggaatcacgaatgaactcattgagaatgacatagaggacggggacgaggaggacagcggcggctagcgagtggtacggatactcaatcacgctgccttgtagcgatgccaggacagcggcgatagccatggtgctggtgctggtgctagatgggatagaatctgtcttggaggtctgtagaaatcatgaacatattgtgaaacgtaaccctaggctacgggatatataagtagggtgtcataggcctaagcgtcgaggcttccattgaatggaacatttccgtgttgtcagggtcgttcaagccgtgatcgtaacctagtgctttcttaccccacattaccccaggtcttccaagtcgtgtcccgccagtctatgcactgcggcgatgtgctcaaccgagggcattccgcactccggaattcttccgcttgacggggttgaaggtataatttgtactgcgttgatctaagtggaccaaatgtgcggagtatgttaactagttatagttacatcttctactttatttggttgtttgagtcggtgatttcatgtgtttttagggttcgcgtcgctcttctatggtattttgcttcttttatatatttctcaatttgatggtctttcaagccttggcatttgtgttgaatatgacatataacataaactgggtttaggtagatcgtggtataatgcccctatttgagatatccaccagcaacagaaggatctctttgccaaattaggttttaaggggtgctttttcctaagaattagggaatccttctgtcagattttgaataactacacagcacttatgattttttatagtacgggtatgatatcatgggataccattgtcgcataagggactagtgaagatcatatccactcgcgcaaggactcccttctctttttttaaacaccttctagaaagaagagcctcaattggtaagaatgatttcacaaccgaagattccatggtggggctactgcatatcttggaagaaagatgacatttttgaccaaaaccggaatccaacctgcagggattggcagtggggccaaggataagaacaaggataaagatatgtatgcacagggggaattgagcaatcccagcaagtggagtagatccaaacaaggtgttcataacggggggcccctgggctccgtgggccggatggggcaaggcaagatggctgtctgtgactgggtggatgtccatggagctctcagtcaggtggccacgaagagattgatcaaggtccagacccattgagacagatctgcagtcccgggcatcaacaatgaaatgtagaatcggcttcccgacgcggttggtatcatattgattgtcgtccttggggttaggattgagcgcaagttggaagctgtccaggtggaattcgggaaatttcttcgcgtcatgtgtcgtcgaaaaccggacggagttcccgagccaattggtgtggaaatgaggaaagaagaggtaggtatagcccaatccccactgtcgcgctgctccaatggtgagctgtcctgctgccatgacgcagagctttgttgtactcgtgacacccctgtattcatagtggaaggtgtagcgatcaagtattcgatactctgtaccttggagattgtcgcaaatcttgcctttcatagaggtgctgttgttgacaggtttattatatcaagttcgtccaaaaaaaaaaaaagagggaattctcatagctgtggtcttttctcccgcccttcgcctctccccttcagttcttcctctcccacttctcttcctctcctcccccccccaatcttctcctctattcctccgatctccctcttccggcgcttattcttgtaaagcaagtatcccggatatttgaacatttgaccacattacatcaccgtacatcggaataatcgcagataatggccgctcggcactcgcgcaagtttttgcgacctctcctctacacatcggcggcccccgccgccggaggagggggtnnnnnnnnnnnnnnnnnnnnnnnnnnnnnnnnnnnnnnnnnnnnnnnnnnnnnnnnnnnnnnnnnnnnnnnnnnnnnnnnnnnnnnnnnnnnnnnnnnnnnnnnnnnnnnnnnnnnnnnnnnnnnnnnnnnnnnnnnnnnnnnnnnnnnnnnnnnnnnnnnnnnnnnnnnnnnnnnnnnnnnnnnnnnnnncgggcgccgccgcaggagcaggtgttatctacatttcttaccgtccgcgaaatattccaggcctcgaagcccctgccgttcctccgccaggttactacaaaggcaagctggtcccgcccagtttcccttccatcaagtctcgcctcgaacagattgaggacctcaagcgcagtgaggaggaggaggaatatgatctgcttgtcattggtgccggagccactggagccggtatcgcattagatgccgccacacgaggcctgaaggtcgcggtggtggagagagatgatttcagttcgggtactagtagtaagagtaccaagctggtacacggtggtgtccgttaccttgaaaaggccgtgtgggagttggactacaaccagtgagattgtcctttcttcctcggaaagagatgaggtcggaatgaccgcatccccgcgcatcccttctaacaatcgcatcgcagatatgcgctagtcaaggaggctctcagagagcgcaagtacttcctaaacacagctccccatctgtcatcatggctgccaatcatggtgcctgttcagaaatggtggcaggctccgtatttctgggctggcactaaggcctatgacttcttggctggttccgagggcattgagacctcgtacttcctcaccaagagtaaggccattgatgcgttccccatgctgaagcgtgacaacatcattggagcaatggtgtactatggtgagtagccaacacggaccccgcaaatgatctaggctaattcccgatcagatggtgctcacaacgactcccgcatgaacgtctccctcgctatgaccgctgcgctctacggtaccactgtcgtgaaccacttggaggtcaccggactgaacaaggatgcatccggcaggctgtgcggtgcgcgcgccaaggacatcgtcgcagagaagaacggcgaggtcgccaaggagttcaacattcgcgccaagggtgtcatcaacgccactggtcccttctctgattccatccgcaagatggatgagcccaatgtcaaggagattgtggcccccagtgctggtgttcacatcatcctgcccggttacttcagcccctcaaacatgggtctcattgacccttccacctcggatggacgtgtgatcttcttcctgccgtggcagggtaacaccatcgccggtaccactgaccagccctgtgagattgaggctcagccccagcccactgagaaggatatcaactggattctttcggagattcgtggctacatcgcccccgatatcaccgtcgaccgaagcgacgtccttgctgcctggtctggcatccgtcccttggtgcgcgatcccaaggtgaagaactcggaggctctcgtccgcaaccacctggtgaccgtctctcagtctggactgttgacttgcgccggtggtaagtggactacttaccgccagatggccgaggaggccgtggacgaggcagtcaaatcgttcaagctcaagccccgccagctcaacagccttcccgacatcagtggtgtcggaggcagtggtctggttgctgacggtgccgttctcgacggtagctgccagacccaccaggtgcgcctcattggtgcccacggttactccaagaccctcttcatcaaccttatccagcacttcggtctcgagaccgatgtggccaagcacctcaccgagtcgtacggtgatcgctcatggcaggtcgctgccttgtcttcccctaccagcgaacgtttccccgtgcgcggctgccgtatctcccctatgtaccccttcgttgatggtgagattcgctacgccgttcgtcacgagtatgcccagactgccgtcgacgtgattgcccgtcgcactcgtctggctttcctgaacgccgaggccgcccttgaatccctccccactgtgattgacacaatggccgaggagttgaagtggaccaacgcccgtaaggatctcgagtggaaggattccttgactttcctttcatccatgggtctgcctaagagcttcatgggcctgtcgcgtcatgatgtccagaatggccgtgttacgcaggttgatgatgccgagcgtgcgactttctcccgtaaaggtatgtttgtaacaaacatttcgatgaaccacagtgctgaccattctagaaccccccgcggatatgattgagagtgacgttcgtgctactattgaaccccctgccgcaacacccgcgctcggttagacgtgtggcatatatagaccggcttgtataaatagaagcgttccttttttttgttccaatattgacactatttaaccagggactttggaaaaagaccctcaatccaagaccttaagatgacgctttccaaaaacacgcgcattcacattcggaaagtgccaccctgagcatgctcgtagtttcaatttcttcaatttcttcaattccctcatttctctccatttctctatatcttgtccacactcacacaccatgaataccagtcagtctgatattgacctccagtcgctgcgctctgtgaagcgcaagttggacccggagaacgattctgttgtaccaaagccagatctggaggagtccgatccctttggagacgaaagccaatctggcgtgaagtacaagaccatggcgtggtggtaagtgtttccttttccacaggcaggatgaagctcatcctttcaataggcaagccggcatgagtaagtcaatgtcttgcatattgcccagctttctctaacaaaccggtcagtcatgatcgcagaaaccatctcgcttggtattctcgcgctgcccaaagcgcttgctgttctaggtcttgttccgtacattctcctacccgctggctgcaaaggccgatgagctaacctgtttgttcagcggcatcctaaccatcctcggggttgggatcatctcgacgtataccgcatataccatcgggcgattcaaatgccgccatgtccaagtgcacagtatggctgatgctggtgatcttctgatgggaagggttggacggactacactggatgtggcccagctcgtcttttttgtgttggtcatgggaagccatatcctcactttttccatcatgatgaacgttctcaccgaacattcttcctgcaccatcgtattttcggttgtcggtctactcgcctcattcatgttgacccttccacggcgacttgagaggctttctcacatctcctccgtgagctttgtgagtatcgtcggagcggttcttactggtatgattggagtcacccttgtcaaacaaggcccagtggaggtcccagctttttcgcctccgcccaaagtgcatgatgcgtgccttgctattgcaaacataatatttgcgtacgcaggacatgttgcattctttacccttttctccgagctcaaagagctcaaggacttcccaaaggctctggcgcttttgcagatgagtgaaatggtcttgtacacagtggcttctattgtgatatatgcctatgttgggccaactgtcaactcacctgctctcaattcttcgggacaattgtttcgcaagatttcctatgcaatcgcactacctacggtacgtatctttttccgtgtacttcttttggatatgagcttaaccaatgcacagatcctgatcgggggtgtggtgaacgcccatgttgccgtcaagttcatttacgttcgtgtcttccgggggaccaactcgatgcatacccagtcatttagggcgcgggtagtttggactgttacatgtgcggggctttggatcttgtcgtggatcatcgccgaggcaataccggttttcaacgatgtactagggcttgcggtgtgtactacctgtccctgaccccacctgcagcgagtactaatcattccaaccagagttccttatttgctagctggttttcattcggtctacctgggctattctggctctatctgaaccgaacttgttggtacatgacctggcgacagagggcattgtttggcttcaatctttttctggtgtttcttggatttgtcattgtaagttgagctctactgtggtttgaagggtcgagttaacctacgccaccagtgcattgtcgggttgtactcgtctattcggtcgatctttaacaaccttcgcgagggtgtcggaggaggtagcttctcatgtgccgacaattccctctattgaggcagtcttacgacaaagaaaatgatttggatgggggtgggtaggttaggtttggaaatgggcaattacactcgggtcacagcattaacgaagcacgaagaacatacgacgcagagaactatccagctacatgtatagaataaattgagttctcttgcacagtttcacagatgtaggcgatatgcaaggagccgagattttgcggctgctacccttcaacggctaagtggcatgtgttagatctcacaggggatccttgtcctcccgatcggatcaaaggcagtttcaggatttcagggaagacaaatgacatcttttatgcaggagatagcataactatccatccagctgtccttttcggagaatcaggccatacctaaagttagagatagcacggtgtactccgtagttagctggttgctatatttcctcggccgggaggtgtacatcacgtgatcggtttcgaatcatttagggtttacgtcacgttgttatataactccaactaacattgtcgtgtttatctattccggccttgcagcccagatcatccgatgaaaagccgaggctgtccaggggcgtactccatccagcacacaaaacgagagttaaggatcaaaataggggggggggcaaatgggaaattgccagacatcttacggagtatgcggagtatgtatgtggataatgatacctaatagacattaacagtactgcgtacgtggcccataaaagctagttagttaatgaatgactcgcatatggtaaccccctgggagttagtgggctcggggaattggctgcagctactccgtccgtactccgttgttaggtcccgaggtcgcatacccgttggtatgtaacaccatctcggactagattgatatgttaattatgttagtgttagtatcgtgtttcgagaagaatagagagaattaaataatgccaacgcaaaataaaagcagaaccaagaatttaaatcaaaagtcaaagaagcggggatatatagcagaccccgtagccaaagtaacaatagctactccgtactccgtaagctacagctgaaataatatccacttcctgacgtctgataaatgattcttattaactaaattatatttttagcccaagtgctgctcccatatattgggttcccctcttttttttttgcgtagaagcccgacgtatgtattgtgtcccaatcaagacagggatcagggccccatacttattccctgtacagcaaaggccccgaagggtgcagaggaaaagtggaaacagaacaacggcaaggcatacatgcatgccatcatcacaccatttccccgaggattggggaaggaagggcgtgaccaggaaaaccggtccttcgatttgctggatttgctgtgtatcgaaatcacatggattcgatccaatgatctccccaaggcaaatcccaactccaccgcttcttgtcttgcacgcaatgtagatcaaccttgttgatctccgtgcagatgtcgcatgggaaggaaatgaagcggtatatcccggcgggatctgattctggttctggctgtaggctctggtcgactcgaagctggaacgtgccgtggggcaccagtactatgcgaggagaatgcgacggaggggagtaacgggtctcgtgatgtgggacattgggcaccttcgaacctacacccgcactcgtctcgctgtaccgcgcaagttctagagacatcatgcagaacctcggagaaggatatggaagaccctcttggctagtgctagcatcgcgtaccgatgaaccggcaattcaagcgtagctagttggcgacgccatcgtagttcgtatttccttggtagttgttccagaaacgagccacggcgctctgggcgacgggcgagccacggtagcgtgtggtaaggaagtaattgaagagggcgaactcgtctggcgtgagcacatagctatctggttgggcttggatgcgattccacagttcggtaatggcagcctccaggacggcggccgattgggcattcacggggccatcttcgcattcgcgagcgtgttctagagcctgtcgaatctccggccagtttcgtgatagaggaaggttggccatatcgttggtgagggggggtgttcagctggtggtgtgctgtgtttgagggtcgttggtgagggaggttttcacgattgatgtttttgttgggggggaaacttgggagaaaagggaagatgtgcgccgcgagggctcgtcacaagcgaaaagggtttcaggccaagtagaatgcggaagagatgagactgtgcataagaccaaacaagaaaatccgaatcttttttctcaataattaaatgggaacaggtgtggagcaacgggagagggaggggaggggggaaaaaccgggccagtagtcccgaaacctatattcatgagtgtgacatccgatagcgaggtaaatgcagatggaattagttgacctgtaggctgtgggacgaggttcaggaacagatcggactttaccccgaaattggagtccacagatgagaagataagtccaagggaagtccaacggttctcctttctcctagagagacgtgaatgggaccacacgccattggcgagacctggaaagacacataatccataaggccacaagggtgtagtttgcatgggctcgggattgcgccgcgctcccttggcgtaacggttttctcgggcaattttaatgacatgctccggctagcatcgaactaagccgtctaggacccagatgagacacggtggagacgggtggaaaccgtcacgaacgtgaaggtgattcgtcgaggagttatagggttcaagggtcagtgtcgcttcaagccgtcgactgtggttggaggaaaggggggggcgttaatggccccagagcaatgtccggtgcatcagttaagtggaaccggtgctccggtccttgtggtccttgaggctcgtgggacttggattctccgaagcattccaatcattgccgagttcgatataaacattgcgttagcgttgttccgtttcggactttccacttacatatgatttattcgttcacatttttatcctggcgattgatctcaccatgcgtgccatgacgatatgtactgacttccgagacctcacacagttcttgttttcggtcacgagcgcctttaactgtcgaatctcaggggttgttcgtccgaaacccaaacgctgtgtttctaggaatatcaaaattgccgggtatcctctccgttgcagtccgggcacgaaatcacattctgtatgagtcccgatgtcgcattcaggtgtcctttttttattctcattatttttattcccgcaaatgtctgtttacccctttcgacagaggcaacgcgtcgtagacatgaggcatttgatgcgttctagcgagtgcacacgccattgttttggtccaattctgtgaattagactcttcgatgtgatcttggccgttcgaatatgtcgagcttgaagaaaacatgcatatcgagggatgcgatatcccaagccctaagaagcgtaagtgggaagcgtaggaaggcgaggggtgaccaaaagacggcaaatgttcgaaagcaagcatttgccggtcaacgccagcagcctagaccggatagattcttttcagagaagtcagagagaaggacaacacagaacaaagtgaagaaaaagcgggaggtgcctggaacacggtccacataaaagcgcaactctaaatgtcccaaggccccggcttcccccttcgagcatcttcccttccttcaacctcacattcctgaagagctttgttccttgctttatctctgctctttaggttgaactcagtactgccaactcgcaacccactttagcaggcagctctggctctggaatagcggcaattcatggggtattgcggcctaacacgagaagaagcaagaatgatgtccgatagaaagcatctgccatggtacttcgagggaccagggcattttcccggtctcggccgcatgccagtatgatcaggtcatggaggtcttgaaccctgctacagtgagctgcgtcagactttgaagtttcaggagttaaattttgactctgctaataccaagctcaataggaccaccccagacaagacccacacggaccttcaagtgacaagaaacgaccttaccttagataacattccaaggaattctctacggaacgtaccaattgtgccacatattgcctcgaatgcagattggaagtctgcgaagttccaaacctgcatccgtgattgaagaatactctcaaatagtggcaacatacttgagctagaatagcccgcgcaatgcggtactcggtgaggatgtggcacaacttctgttagctgtcattttggaaatggtagggtcagagcaggatcctgatcacgaacccatccggtatggccaaggagatcttatgggctgtgcgaaccctaacgaaatctcgtctgatatttcagacagaactagcaatttaatattccgagacactgataccgttgccctaccggcctgattattcgttgatcatttgagtctcttcctgaactggtgtcttggcctggagtagccttcgttgaccgagagaaacttggtatgatacgggcatggcacataatgggattattgatcgattgtactaattgatgctcgagtgctgtcattgaccacaaaagctaatataccagtagtataatttgttttacgttcagatggtcaagtccatcgttgctttcgattgttgttacttgactctgctgatgaacaacccacggggctctttcttgcgtaccaagctcttcagggctagttatatgtcaattataaagtctcgcactttttgcttgttctaccccgtctgtctagctattctcttgcattctaaagctacacacgggtgcaggttctatacataaaaactaggcaaggattgcgaattcaaatattctagaccatgtcaaaggtgaggttttacgtagtctatagaattcggataaggttcatactctatcttaaaggagttataaactgtgctcagtctctttcccttgctttttatacaaacataagtaccctgtagttcccagacacaggtatttgcatattcacataaaagccaagcttagccaaattgaccggcaagcacggataagaattgcccagctttatttttatgacatctcgagggcgaataaggcttctagccctgctggaggcctggaggcctggagccctggagatctatactgctgactaagctatagataaagattcccccaccagcgcgccatttcaacttttgacctgcgccgatcacgaattgtgagaacccgatttgcccgaacaaggtcatttgaaagaaaagaaggattgaatatcgtcgccatggtgttctatttcacatcgaatgtcgttgagccctccgcctttatttatgtcggcaaggacaaattcgagagtatgtcaccgacttggtcaacctagggaataaacttctaacaatggtgtcagacgaggaactcataaaatatggattggacaatgatgtctggtatgtttcccggtatatatttgtagaacttcggggctgatattcttgcgcaacagggtcagtctttccctgtccgacttgcgacaacgccaatcgccctaaccctatacatttgcagttccacgtcgacaatttgtcaagtgcacacgtctacgtacgccttcgagaaggcgaaacatgggacaacatcgccgcgccgcttctagaggactgcgcccagctcacgaaagcgaactccattgaaggtcagtcctcgacatgaatccaagcattcgtaccgatggagactgacttctgggaaggaaacaagaaggacaacattaccattatctacacaccatggtcaaacctaaagaaagacgggtcaatggcggccggtcaagtcacattccacaatcacaaactggtccgcaaggtctatgtcaagcagcgggagaacccaattgtcaaccggttgaacaagacccgagttgagaagtaccccgatctccgagccgagaaggaagaggacacgaagaagaagcagcgcggtgatcgcaaggcccgagatgaacagcgtgcgaaggaaaagaagaagcagcaagagtatgaacagctcaagtggcagaaagatcatgcatatgatgatatgttcacggaagagaacctggaggctagcaacaaccaggaccgtgatgaggatttcctcgacgacttcatgtgatggacaccgaaggaagatgaccttttcctgtgtgtacttttcacagccagcgaactgaaaattataccctctgcattctataccacggaggatgattgatatgagtacaacaaagcagtcctcttatccctgttgcctctttttatctactacggtcatatacaatgatatagcgagatagataaatactcaaaacccgacgtcttactaatgtcgtaagcatgctaggattatttttcaatggacatacaccatgtgaattcccttggcatactatgggaactacgaggctcgcagtgtgccccatacgcacttcagtacagaaccataaaagatccaaacatgtcgaggtagatacaggccaaaaaaacacaccaaattaaaagtgaaaattaaattaaaaagacaaccctagagaagtagaatagccctagggaggttgatagattaatcatcgagccatagggcggaaagggcgctaagccgtgttgacagcttaccctgtaaccttaggaattcaccatcttcctctcccaaggcctttccaaacaccacacagcatgagcgagggaattccaccgtctgctacaccaagtaagggcattcattttgtgaattggaacccgctgaccccgcaaaaggcgcaaagtccaagaagaacaagaagaaggccgcgaaagccaaggccgactccaaggccgacgagccccaagaggatgcgccagctgatcataatgacactgatgtatgtggtaaacctcccccgattgtcattgtacctttgctgagaccctacaagaacgagcacaatgatgccaacgaggccgtacaagtgccagaatccaacggcgccaagcccgccacgatagacggcagcctgcctgatcggtctgtcaagaaccaggagtccgtggctactagcgatgcccccccacaaaccgataaccagtccgaccccgcttccgctggcaccgagccaaaagaccgattcgatgcacttgttcgagatcgcgactcgttacgcgcggaagtagccgatatgcgaaaatcattggaacagattcagtccaagcacaccgcagacatggaagccctgcagcagaaattggaggacgcggagagcaaaaaggagcaggcggaaacgcagttccagatgctcttggaacgagttaacaccataaaatcgcaattaggggagagactcaaggaggatgctgtgcgtggctcagaactcactactcgggctttttggctaatcctgccctataggaggaattatctctagcgcgatcacagatcgaagagctcgaagatgagaacgaccacttgaaggaagagctcgattcaaagtccaaccaactcttagaactatcgggcgactcagcagagagagagaaggagctgtctactcttcgggaccggacgaacttatcccagcagaattggttcaaggagaaggaagaattgctcgcgcaggagtcatacctccagtcggagtttgaacaggcgaaggaggctatgcataattgggaaatccttgccatggaggagcggtctatccgagagaacctcaacgagaaggtcggggatctggaggagcagctcagtagcctgagagatggttatgaacgcgccacccaggaacgcgacacccaacagtcaacagttgacggccttcagcgggctttgcaggaaattcaattggcgcgaaagcaagagctgcgggagcttgtcgagagctctgattctcaactcgaggagctcagacgctctctacgggaagcacagaagcaggccactgacgctgacaagggtctgcagaaggcccaagaagagattgagcgagtccgaccatttgagaaagaggtcaaggagaagaaccttctgattggcaagctacggcatgaggcagtcacgttgaatgatcatctgacgaaagctctacggttcctcaagaaaggaaagccggaagataatgttgacaggtatgtccttgttacctcgaactacctcggtttcacactgacttcatacagacatattgtcacgaaccatttcctgcacttccttgctttggaccgatctgacccgaagaaattccaaatattgcaactgatcgctgccctattaggttggaacgacggtgagtactgctaaatgcaaatgaaaatttttcgagccgatctaattatcaatagagcaacgtgaacaggcaggtcttgctcgcccagggacctcgagtatgcccgggaagctccgagtccctggcactcccctccgcacgccgagcacgccaaatctagcggagttcatggacaacggtgcctctagtaaggagacattggccgaactatggtctaatttcctggagcaagaagccgaggtgggtaatatgaatccatcgcgacgaggaagccaccaaaccctgcctcccaaatgatcgagtgcagaaatgtatgtataaagcagggaggccaagtacttggatattgatactttgatacattggtatttgtcctttccttttgtttgatacctcgcatgtatacaacctatataatagccagcgccaagaaatacaaaggcccagatgaatttgttccgccttcctattaaataaacaggctaagctgtattgggacggaacaaagccgtcttcagctaaataatcgctttgttcatttttatttcagtccttatatgcctctcttgtccttccgtgggttttcagcgtttttcaaaccattagtacgcgcgactcactctgcatctacaatggcctccgctggtaagtcgaaatgcaccatggcagaacataaccccatgcgacgcagacacaactgacaggaccacttctatactaaagcctaccgccctattgtgatttccggcccatcggggaccggaaagtcgactctgctcaagcgcttgttcgccgagtaccctgaaaagtttggattttctatctcgggtcggtgccaatacaaagggaggggttaaatgaattcgcaaacggctttgctcacgcgccccctgaatagaaaccacacgatccccgagacccggcgagcaacatggccgtgaatataacttcgtcacgaaagaggcattcctcgacctagtggccaacaacgggtttatcgaacatggttggtggacactgcgcacgctacaagaagagaagtcggacgttagttaacggatagcgcagctcaatttggcggaaactactatggaacatctgtccaggctgtcaagaatatcgccgagaagaagcgcatctgcatactcgacattgagatggaaggagtcaaacaggtgaagctgacggacctcaatgcggtaggtgtcctagacaatctgataatggtgcgctcctctgatgatctctagcgtttcttgttccttgccccaccttctctcgaggtgttggagcagcgtctccgtggccgtgggactgagaccgaggagtctctacagaagagactcacccaagcccagaacgagcttgagtatgcaaagctcccggaggctcacgataggatcgttgtgaatgacgatctggagaaagcatacgttgagctgcgggattgggttgttgacggtggtaagttcggtgttgcgcaatagtacactacattatgcataggaaatgtgatttaatcgacatagccaaaaaggcgacatccccgtttgatatctttcaatccaagaatagaagtctcgtcaagttaaaattaagaaaactaagtacatggaaagcaccagagatggcacgagcacgggagcgccaattctctttttccccggcaatacaagctcaatggttctcccaagaagacacaagatgggatgtaggatacgataaaaacaaaacgcaaaagaaaggaaaaatgggatatctgcaagggcctgctggcgtcaaaagaggacagtaagttttcgaagagcgccgtcgcgcaacggtcacagcgctcacatcagacatgaaagatcagagtttagtatccgttcatgcctgtgcgctgcgagttgcggctcagctctcggtcagcggaggggctgataggccggtttccaccggtgtggccaccaccggcagcgctgctttccttcagggcaagcagctgcttggcacggaaggtctcgtagtggatctggctggtagtctcgaccagatcctgaaggtgggtgcgggtcaggaagttgcgcaggtagacaaattcacagtggttctcgtcctcgacgttaatgacaccccagcggttctggcggccgcgaacctgcttgccgttgacaacaatggtcttctcactgccaacaaccgagaaaggaatgatgtcctgtaaccagaggtcaatatccaatcagaatagctctacctgggtcaagcataccttgatctgagcgttgatagcacgctcctcatcatcgagctcgtcattatcgtaagggtacatcttcaggttgtggaaggcgaactcctccttgatgcgctccttgaaggcctgacgctcttcgagggtgagggagtcggacttggcaataacgggaacaacgttgacgacatcggacagcttcttcagaacaacgatatcgatgggcttgaggctatgcggggtcaatgagttagtccagaggagctctcaggaagctaaggaatgcgcggggtaagctcacgcatggccggagggctggatgaagaacaagcagcagtgaacacgagtatcttggatgtaacgctcacgctgagcggtgagttccttgcgcaggtatgccgagtgttgatccttaatgtacttgacaatggggtcccagctgatcatgattagcttagacctagtggctccatcttgatggggcttgaattaccatcgatcgttgttgacctggtcaccgtaaccaggtgtgtcgacgatgttcaagcgaagacgcacgccgttctcctcaataactagtcacccgtcagctattccgcatcgagctcaactccctgatgacaaacgtactgtgcgactctgtcttgatctcggtggtggagcgaacgggttcattgggggtgagacggcccttggagtcaatcaggtgggatgcgaagatagtgttgatcagagtcgattttccgagaccagtttggcctacgcgtgaaagcattagcttgaggctttcatcggcgcgcaggtattgcccaacacataccgacacacatgacattgaactggaagccacgcttcaacagcttgcgctcgatttgcgaggtaatgctgtcaaaaccgacatggctatgggggaaaacagtgggctgttgagccgtagctgcggtggtagcggtggccattatggacggagagatgatattgaagctgaacgaaagacagaaatagaagccccaaaaagacccgaagagaagagaagtatgtagttgaagcaagagcaccccttattatcgtcctctttccgaactcaggggtgggctattcctaatcgggcctagcgtctctccacgagaaaactaccgtcttccccgattgcgcttttgcttcagaccttgtgatagctcgcaccaccagctgaggacgaacccccgttttttgttcttgaaaaataccctcaccatggcattgcgcctcctccctttcgctccggcaaacatgtcgcgctcacttctgtccgagtacctccaattcccccgactcgctcggttcctcccgatcacacccatcgcgaccagcggattcctacaaccggtttcgatctctctcaatatcccatccctcctctccgatctttgggattccgtcctgcgcgccgttcctaagaagaagacctcccacatgaagaagcgtcatcgacaaatggccggcaaggccctcaaagacgtgaagagccttaatagatgcccgggctgtggccagatcaagcgtgctcatcttctgtgcccaacttgtgttaaaggtaggaccgaagcccaagctggaggaacatatatgtgattattgcggagaagctgactagtcaacagacatcaaggaatcgtggaggactctggatatggcatgagagcactgtaagaaataagggcttgttcttggggaatcaggatcaacattccaaaatcccaggctcaagctcaacaaaagagattgtatttctagaattggatgtggatacatgctgcatggcaactggcgtcttggttttgcgggggaaatgtttcgatatgactttataacaatccgacctaggtcggatttgaacgctgtgatcttttcaatttacctctttccatgtaactccggagcaaaaggcactacggagtacaattgtagatgttatggtgacggcggctagtccgggtgggaataattagacatattcatgctattacgactttactgctctatatgtgagcgtatctgcctctacttggctcctacttggctcactactagctttatagccacgtagtcgagacaagaggtactagatagatacatgtagtcaataataccaagtacacagtaaacagtgactatttcaaccctgattagctccaagcttaattttattacctgctatccaataatatagagacacttagctcagtagagttgttatagcacggtatatatacctaatttgcatgtggtaactatcatcttcaacaagatgcctctatcagccgtaaagagaaaaaaaaaaggcgccgataaaggcggaacgcgccttcgggccccaacgtcattgctcctccgcaactaaagtctcgacacagtcgtgagtgagcacggcatcatcagaatggtaaggtcaaatcaaaaatcaatagattttatcgctaagggacattttagtcgaaacaatacctctcgaggggttctgcggacaatggtgggcttcccgatgcacatatatcctgggtgatttggctaatatctgttttatagcgcacattattgatatcttctcgctggctataaccgacaagcaaattctatcaacatcgggtgcctcgtccatcaaagtgcattccaccatcgacgctgacttcccgctggtgcagtccattgatggtgcccataccattggctgtcaccacatcgtgaccaatgggaatggctcccgtgcaatcaccgctgggtttgatggcgaaatcaaggtctggtcttgtcaggatgggcattgggctgcagacaccaagctgactggtaagaactgcccctctttgataggctacagggtgcaatactaatagcaccacagccgacctcacaaatgccgatgcctgggccatagctatttccgaagatggccaataccttgctggtgtcacgcaggaggggcgcattaatgtatgggatttggctgccgatggcactcggattcgagaccatgagaccaagggcagctttggtacttgcatcgacttggtgagatttcaaatgcagccagatactggcccctgttaaccttgacgtctagtcccccgatggtcggttgatcgcttcaggccacgaagacggcgcagtctatatcttcaccaccgaaacaggccgcatgccattctctctttcaggtaagcgaagttgtctgagccgagcagaaatacaagttctaactcggcctaggtttggtcaatcccgtacgagctgtggctttctcgcctaaaagcaagatcctagcagctgctggcgactccaaggtcattgtgctgtatgacacttcctctggtgaacaaatcgccaatctctcagggcactctgcctggatcttgtccctttcctggagtgatactggcgagtaccttttgagcaggtcagtcaatatcctatgcgtctatacgccggcaagctgacattttcaagttcatttgacggcaaggtcaaggtatggtctatggagaccaagacatgtgtcgctacacactcagaaacagataaagccgtttggaacgccaagtggcttcccaagatcggcaagacagaagggttcgccaccgctggcgcaaaccgcagcattgcattctaccgcgaggctactgggtaaaggagtggctgaacatggggcgttgcagaaatgtccttgcaactgcgttatgacgatttcaatggaacctagaaaaccttactgaactatgcataaaaatcatgaaattcgtattggaacaatgacagtgacccaaacgaccgtgtacttgtgcttatttcatcgcctccacaaacaacttgcgcatccgcttcaagaacgccccaaaatctcggtcatcgttcacgagatctacgacatgctccaaagcatcccggtcaaccttggggcgcgtatggaaaacctcatagtcgcgactggcagtgcccaattcaaaccaagcctccgcctcccaatccttctccaatagatggctatagacaaactttaaccggtcctcacgaccggcgccttcaattctaatacaaaggtaatcctgccagaactccaactccgggaaattgagacgcgattgcgcatctaaatactgtgcgtgagacttctgtgcctcgatcttttgacttatcgccttctgcgtctcggcaatctgctgcttcagacggtcgcgtttggtaaggcgggcatcgcgttccaaggtgatagatgagatagccgcgtgcatttcagccgcttcggctgcttccttttgaagggtttgttcatgggtttgtgatttgaggttgagaatttcgatatcgcgctgtcgcatgcgctcgtcctctggcaggttttgttaggcacagtcgtgggatatggtgggaacgggggtgttcaagtatcaactcataccttcatattcagccatattaatgtgaaactggtttcgttcctctaagactcgtttgcgaccgcgctcaataaatgcgtcgaacttcactgtgaattgtgccatggtattgcggaggtcctcgaacccaaagttgatgctgggcaatgagtctgccattgacggcgcatccgccgaggcgagtggtgggcgcatgccactcgtggagagcgacggttcgaatgaagaagccatagtattgagaattagattgtgagtagtgtatggtgaagtttgaggttgacgcggggacaatgcgagagttgttttgggttgcggcgcaacaactccgattcttatcgataaggatcaaaaaacttcccggtaccgtctccgcagctctgcatcctgacattatgcgcatatgtatatgaccgggtgaattctgactgctgaaccagtttcgacatggtttcgccaagtcctgaacctgatggatgaacatacaagcagtgctctccactatgggcacgtcggacgagctgtctatcttcctgaggagcaggaatggacgttcactcgttcttttgctaggcgtaggtacttgagcctccttttcttcaaaccagctaacatgttcccaagccccgttgatcaaatataccggtgtgaccaagacaaaaatcccatcgcctttccgctcagccaaagctcgaccaatacccagagtacccgagaaagaccctaggaggttaatcacaagcgcgcatcctgatttggcggcatcgtggtcctccattcgcgctgaacctttgtcgaaagctatcacgactgtagccgaaaaatatgacccggaggtctctgagctttttgatctcggttatgcggtggatcaaaggcgtcatgacaagaggctgcgctcagttgcaattgcggtggctgttaccggagaatgtcgtaatataatctcatttcgaacactggaagaggagattttggagttgacttctccacagaagttagcattccgtgctccatctatcagtgaccaggaaatgtctgaatggtccaagtgtggtgcgccggtacgtcaagtacactttgcacgtcccttggaggagaagcccatgttcctggctgcccgtctccctgcaacgactacaatattccgacctctttaccatttcgaccctgtgcctatgtgcccttcgggggatagtatactgggatcatccacccctttgaaaaactctcggctggatgcgaatccaatcgcggagctatgtgtgtcgcaaacaggtggcttctcacatgcagatgtgacctttaacccctggtatcagagacaattcgccattgtagacaccagaggtaagtggagtgtctgggagatcaccggcagacagcgactccagcaggccacttgggctgccgagcttgtcaaatcaggctcgttgcccatgcaggattataaacgcaaacatggttgccctcgccttgatggctgggcatcaatcgagtgggtccatgatgttggatcgctacttgtctccaatcgtcacaacgtcataatctatgccttcacggatgaccagattccaacacgcacggttgagttgggaatgacaaagccatctgagtgggttctagatgttcaaacaaactcgcgcaagccatcacagtttttcgtcctgacgacaacgagaataatgtggtttgatgtcggagccctaccaggcgagcatgacacaagtctttcactataccctcgagtgtcctggaggcactttcgagaccccgaagacacgaccttgcgacttagcgacatagtcgtataccaaggtatgtgcttgcgcgattgaacacggacttctaatactaagttattatctagatctgtatctcgttctgtattcacagctcacccggctagtacaagtattcccttgtcccttcatatccgatgaagagactgagtccatatctgtacccgatcccctggtgctagatgcgcccctgttggcggatataccgtcaactcaacacgactctgtcgtgcgattctcgagactcgtatttagagaaattgcccactctattgcaccagtgggtaggaatttctacaacgccgacttgccattcatcaagcttttctggatggattccaatcttgccgtccacgaatctactttcgaggccccgcgcggaaacccagacgagccggactcgtttcgcgaaagcagtatcttgcggttaagaaagcgttatgctccgacaatatgcgctggacccaccgatgactttgttgtggatgattgggatgaatcagcgacaaagcaaacgattgttcgtcgttgcaaaccccaaatgggccgcgttgatacaaggtcggacttgcagtggaccctggacttttctggcgtctaccaaatagcgacagggaaaatgaaaatggaaatccatccacaaaagcagacgaagagattaatgcccaaaccgaggacacttgatgcgttaataggggacctccaaatcgaaatggagaatggatcggaccaacctccaggcaaaaccatggttgaattgaccgacaagaaacttctggccgagggtcttgatgaaagagcagatgatctgcaacgactcatttcagcactcgtctctaaacagccgaaccccaacgcgcaatgtcgatatatgtttctaccactcccatcaccgaacggcagttatggcatcccggccaaactctcaggcgaagcagataacgatcttttaaatacatatgatcgaatcgtcgatgattggatgtctaccctgcctcgcgccatccccgtgcagacccgactcatgaaagaacaagtcattcggggggttgctgtcgatctcatcctttcgcgcctagtaaaaatctctacctcattagatagcatcatactggccaagcccacagatcctgtcgaggaccaagcaattgagaaggcaaatgaaaaggccgcgacacagaacaattatctgcaatcgagctacttctcattatcatcatcgcagatccctgcaagccaatcatcaatggccaaaagccaagtctttggatctgaaccagacgcaatgccaatccagcagtccaagtacaccgcagtcccggtcttgagtggtctctcagcattcaccacattcaagaccccacgtccagcaccacgaaacgtgacaaacctcttagcgcactggtcggtaggaaccaacccggaagactattcatgggagaggatggaagacgaggaaatgcgggagacgagggcacgcacacccaggagcagacggaagaaacgcccacagcctcgtgaccaatccctccctgcgactccggtaattcctatgatccggacatgggacagtcagccactcgcacctccccgactcaacgtcgccagtagtcagcccgcgatggatgatgtgtcgatgacccagatggagcggggagcttttggagcccgaccactcaagaagccgaaacagaagaagaaaagagcagctggattttagaaatggcttatagatcaaataattcaataatacatactctatacttccgcactatatggcctactacaggagacattggctaaccaatcgcgaatatggctcattctcaaagggatgaattatgacaaatgcagatcaccaaggaggacgccgaggtagaataagaagtatataatctccttttctctctttctatttctctctctttatctctctctcagccattcctccttttggtatattcacctgaaaccggaagtccgctgttatccgccaagcatcatcttcccctccttcaacaacaccccgcaccaacacaaatcaaattcccaccatgtctgatcaccagtacaagttcaatgtgaccatgacctgcggcggatgctccggcgccgttgaacgtgtcctcaagaagctggaaggtaagcgacgcgcggcctgtttcatcgttttttgatcctaacacgttggtctttaggcgtcaagaccttcgatgttagcctcgagactcagacggtcaatgtcaccaccgagcctactcttgcctacgacgatgtgctggaaaagattaagaagactggaaagactgtgaacagtggagaggcggatggggagagcaagcaggtttagattctctcaatgctcacggtgtttccggtcttatatataccccttttcgcatgaggcctggaagtcaaactcgcgagcttgcctaagctcgtggtactcaggcccaagactagactcggttgctaggcagtgctaggtcgaacataccaatagcatgcattccaacttcggaaggttttaaggttgctctggaattcctatgactaaatgacccatgacgagaaatgaaatagatagaaaacgaggggaccgcagttcccgattcaaattggtattgagacccatgaggagagaaattctaagaatatgcgcaagggtatcatgaacaacaatgcaatcaatgcaataaatgcaacgaatgcaatacaaagcatctcaaaacaaaggggggatgtggtggtagataggattaataatccacaatcacgaaatgtcttccatcagggaggggatagggtggacgtggttcaactctttgaacatagactgggcgatcctgctccgtagtttgggatgaggaagggtaattggaggatggtctgtatctgggttagtgcggaacttctcggggcataggggaaagttgtgttgttgaagtggttagtttcccaatgaaggcttaccgcaaggagttgaacccgccgctggctggtctttcatggggggacacgtgaggctggagctttcctatgatagagtctgaaaaggtgcgaaggtgatcatgggaaggagtcactcgcggtcctttgggcaatgagccacgttgatccgacgaaacttgagacaaattctttgtgccaaggtagtcaaagtctctaatccgggtggactgagacggttctccaatgggcgtggcctctggtccggcgcgcctggagacgtattcaagtggagggggctcacggtggtcaacatgccggacaaagtcctcggcataaaggttcctgtctgtgtggacgttctctgataaagggcggccactatcaatgcgggtgtgccgcatagcccgcggctctttcggagcacggtccgaacggaaactacgatcaccatggtaaggatgccacggtccggaattggatacggctggagccgctcggaaggtgcgatccccttccgagacaacgatactggtactggaaagcccagcctgagctttaggctcgtatggtccgctgatatgctgtcgacccaagactgaccttgtttctaggccatattgtgcgttggaataagaaagcgagttctggttcctttcccgctggtatcctacaacagggggttgttccactggcagatagtcccgacggaaatgaggtagctccttgggtcggtggtcttggacaagctcaaggcgacgataagggtgtggcgcgaatccttcggaaacgggaagtcccataggccttgcactccacgggtctgggcgggactcggttcgagaacgttcacgacatgtcagacgccttcttttgctcgcgtgttcgctgtcaccttccttttcgatggcatcgggatgatgccccatctctccttgagaataccctggcgtgaccgatcggagggacattttgttggtcatatgtaccaaaggatgcgaagcgtcagtccaccggctttctattggccgggggttttcgattgagggcaagatagagtcctgtgtgtttgaacctggtctgagaagaggggtattgacggagtcagggtaccgtcccactggggtcaatttctggcgattttcctttggtccgctcacaaacacaggtgcgttggtcctgtccgactgaggaggcagtctttcttgtcggaatatgggctccatcctagagggagggacatcctgcgagtggctcatgatcacattcctgggcccagagagttcttctaggatttgtaactcgggtgattccttattagttagtccagttggcctggcgttcatatcataggttgaataattctgttggacatccgagtgaagatagttctcctggatacctacatgtctctgtcggtccattagtggaatagcgagcactggatgtgcttggttatcattactggctgagcctggagcgactcgccgatgaacctcggcgtgttgaggaactatatcctggcgcctagcagcaggtacttccttagtaatgcgttgctcggcatatcgagggctttgcttttcagcgggggcaccggaaaacctcggttcttcggtgccctgtataccctctctatactccttgacagctcgggtccatgctttgtacctgttaaatcctcgacggttgatggtatccgtggctggggctcttgtgacaaatcggaacccaggtggtgcctcctcggatagttcccgtggaagatcctgaccaagagaattcgtattgtccataggctggcatcggatctcatgggcccgagtatcgcttgcaagtatttccacactggtgtcctggtgacctgctgaagcaaccgcatcttcttctgattcactgtcttcgtcgtccgagataacgatcacctcgcggaaaacatcttccagaactgtctggccgttctcatcgtctcctcgccactcaatgacttttgctagagttgtgtgttccacaacccctcttgcttcgtggaaggaagtggttttcaaaaggcgatcgtagtcagtgtagacatgccgaacgtgagcaaccacagcgagttgggctctgcgagccaaaggcaattcggtggcagtcccaacctttttctgacccttttttggatatcaggttttccaatttctcatttctcaaatcaagattgagtatatacgtaccttttgaaaagcagtcttgataatttgattcaaatccttctctggcatgtttggaaagagatccttcaaggcgtcccgtgcttctgtgttgagggtttgttgagaaatttcagattctccccgaatgttgttctctagtttctggatggggaaggtactaggcactgttttaccggtgcttgtgaggtagaaccccagttctgagcaaacagctgccaccacggtactagggaaatgataccctatccgatgaacatgctgggacaggttatgatggcgatggtggggcgtagtcttaaaaataagcagtgttgatgattagcaaccagatggggttctcaccgatactgcgtagatctggagaccctcgtctcgacatcgctccttgcacgttgtagtgagttgtggatttcccgcaggaatgaaggtgtagccgcttggtgcttgcgcttcaaaacagatctgttccatttttttgttaatcatttggtcatgccgaagcagggaatatacgtacaacactccgaagcttcttcttttcttgggtgaccgattccataataaccttgtgtcttctcgctcttctttgcgtagcccggtcggggccatgcctgaccgagccagctctccttatgacgcgggtcatacttgcggttcagcttatcgcagaaccttgcgaagatgaagatttcaacacatcattcacaatatgtattagacgtgtgatatgaacaggtagatggtatgtgcctcgttgcctggatcagggtgaatggcgcgtggtcaagtcaagacagtcgtgttatgcaccgcagtaacgaaaaaagtacgaagtaaagacaccccgcggtcaaccgaaacaggaacaaggcccttgatgcgagccttctgggtcaacttgagcaaaatcgtagggagcaaagagcaagaaataaaaaaaagagaaagaatgagaatatcaagaaggatggagggagagagagagggagagagcgcagataagatggctattgcggcccaagtcacctcctccccctctcccgatcaggctagtcctgcctgaggcttcagcctttccccaactttgaccgtcttttgttcatctcccctccaatgcgaatccaacatttgaactcaccacttcggatctccgttgattccgtctgattccgtctgattgcacatctgccgcatattccagattcgttggctcgtacatgtccaatagatcggccatgaacgcttcaatccaggccatgaaggtggatacacgagctatggtccacgcataccgtcatctctaccgacaggggttgaaagcgattcaatattcgacgcccggtcgccatatgcttctaaagtccctgcgaaaatcctaccgttcctccccttccgaagaatttgatcctgccaaaatcaccaacacactccgctttctcgaacgagctactgaggttgcgggcatggaacacaagattttgaagaaccttttgctagctagatattgggagcaagatcaccttgtgagggagtcccgcgtgtgagtgaccaccaacagaagtggagaagaaagccgctgacttgccctcagtccgcgatccctgggactcggccatgcagagaaccagctacggacaagtgtctttgaccattacaatttgacacttgaccgtttgaatgagagtctagggacatgtctcagatgattcgaaccccgcagttctcgacttctccctcagtgctgatccgacccgctatgccagatcgtgcgtccgttaggcctcagtgcttcccttgggcatgaatccgcaccggcgcgaggcagctcgcccaaaatgggattgcacataccgggtattgccgtgatcaggacaccggtacatatctcaatcgcatcaggattgcgtaggacacgatgacccgtcttgcctctaggtcagcctcgtgcgttgtattttacaatcttatggcatacagcacattatgtcgatggcaatctacacgccttggcattcaatgcaacgtcgtatagccaatcctcgtctccggacttgagactcattggtagatacatagtaggatctgcaggaagacagcattgatgatagtctactggtagaatactttgagcaaattccaacccaaatgatagtctctactccttcccaatattccctggttttcgagtccaaccgtccaactaaaaagtgtgccaatctcctgaggctccagttccagagcatgtgacgatgattcagcaccggaggcggtgcccgtggacgtcacatgtcacgatgtctgctgttccggctccaagtttgggtttgattctgcttgatttcaagcatccaaagcgatttagtgagatgctggtttagagcccttcatgagtggtttcatttcctcattgctgatccaagctggaatactatcccccttaccaccccaaccgaacagtcaaccaaatgacgacgaagctaaattccacctgaacaaaccgacatacccctcgtgtgatagtgaaggccataaattgagtcctctactggaccaagaccacggacagaactcgaattgcggagatgcgggtgcggggtccctgcatagccctcctttcttcacaaccctaccgaaagagatggatggccgaaactcgcaatcggagggcactcgatcagtgacccataacacacccggatccatccaaaacatagatgcgaccgcaggcgcctccattgatcacacacatgaaatcgacgtcaccgtgcagccggacagttcggggaattcactagtttcacatcccagcgaggcgctgagctcgtccaatgagccacaacatgcttcaacaatatccaccagcgagcctcggcaatctctcgacaatgcctttgatccggagggactggcacagtcttctcttccggcggatgatgggatgggagttctaagaagcaagatcattgcaatcagggagttggagctcaccaatgttgaaaaggcgcgcatggttcacggtttgatgacagaaggttaccactcatcccgtgagctccgaagcgcccctggtctaggggtattctcaactccatcaagtccggcgagcttggggctgccaacaagtccgaggactccgagggcctcggagatcaatacttctaggtcgggctcaccatactccgaatcagactctctttacgagacaaccttcaatctcacagctgaagatctgcagcccacctttgtacccaaggtagaaacagaatcaccagaactcgaaactggggacgaagagggtgacacagaagaacaagaagagactagtctggggtgtgtgcattatcaccgcaatgtgaaacttgagtgccacacttgcaaaaaatggtatacctgccgcttctgtcatgatgaagtcgaagatcactctctcgttcgtcgagataccgaaaacatgctttgtatgctatgtgggtatgcacagcctgcagcgcagaactgcagacggtgtggcgagcaaactgcgcagtattattgcgaaatttgcaaactctgggataacgacagcaaaaagagcatctaccattgcagcgactgcggtatatgtcgaattggacagggactaggaaaagatttcttccattgccaggtaagggctccgacagaggttagacgatactggtactaacaacatatagacatgctctgtttgtcttcctatatgtattgagaacacccatcgctgcattgaacggtccacccagtgtgactgtcccatatgtggcgactacatgttcacttctccagaaaccgtcgtcgtcatgcgatgtggccacagtatacaccacaagtgtctctcagagtactccaaaagttccttccgttgtccgctttgtagcaaaactatcaccaacatggaatcgacgttccgaaacctggatcgtaccatcgatagccagcctatgcctgacgagttcaaggataccaaaggccttatttactgcaacgattgcggttcgaagtcggttgtcaaataccattggctcggcttaagatgtgatttgtatgtactcttcgaaaaaaatggtcaacacctgctgatagcatctagatgtgagtcgtacaatacggcccaaattcgcattttgcacggagatatgtccactcaagccgaggaagacttcgggcaagacctgcttcctcggcctcgatcgtcttcatacactgaaaacgatgacccgatctcctcttccctggcagcactaaacgtcaataatacatcagttcctcgttcacggctcagtgcgcctatgtctactgaacccgttagacgattttcatcctacaacattacacgaggccgtgctgtctcgcccgtcgttagcaactactttggactgccgactgagcgtgaatcagagaaaccttcatctattcccttctttgggggaccatctcgtggcgagaatgaggattacggtgcattgaatttcttgagcaagaagcttacataccgatatggactgtttggaggtgagactaaatcaaccgaaagcgtattggaaactgagaatgaagaagacgacgctgagtcttctgactcggctgaatcagatggttctcctggtattggggatgacgacgaggaggaagaggaagatcaagatgaagatcacattcagattttcggtcatcagtgaggccgatccagatttttccaagtgaacccagatgctcgtcgtccaaggaagtgtgacccaacagctatccttgccctctttaattttcccccatcagcccctgcggcgagcaataaacatcgttcagcccttgcccacaatctacccggtccctgggttcgatttcagagacatctctgaaccggtgcccatccctgacaagaccgactcaatatttctgtcctggaatgatagcgccgtcattttctgtacctttacacatgtgatgactacaaatgtccacaactaagtaaagggcacacctcaacgcaactcggggattgttgcttttacacacatcaagcagccggcttcgctgcagcatagcgttcacttctttttccggtttaaagcacactggtatcatgacgcaacgatagcaattttattgaaactctccatcttacttggcctacactagattgctagaaatattatagtcttctactttcactgcgtacttgacgatataaagtatttaaatacctagtagaagtagctatagtaacctaaaaaccacgtagatagtcatttcccttcttacaataaaagccaatcggactaaagtgctataaaccgatagccacctaacataccaagcttccaagctataaataggattgaggaagccctgaagaggcgatggatggttatcgcgcttacctcagcttctggttgcagccacaagattccattgacgatccaggttgtatcagacatgatgttgcctggtttcatcctgtcttgcttattgaaacacctatttagccattgagccgactcatctgacttccttttcctaatttcccgtcctgaaacgaggcacggatccctccactcccccagccgagtgatgcgcatgtatttaactccttgatttcagcccgtctagattgctcctttcttttcttaaaagactggaaatcactcgacaaggatcctataacctagcttacaagtgaaattcttgtgaacaactccaacctcttccaatctcttatcagtactgccccgcggaatctccttcgtcactttatcagcgccgcgtcgcacccgcgtcagccgtactatgatccgtcgcaactccgacatcgagattcagctcccggacgctggtccaacacctctctcacccgattccgtgagcgatctcgatgtggaaatgttctctgaggagctgacacttcccttgagtctcccaccacacatcgcagcccggttcgcccgcaaaagcagcaaagcccgccgttcctccaccgcctcatctcgacgaagctcggtgtcatccttgcactcgcaccattccaacgcgtcctcaaatggctcgctaagtgcggaccatattgctcagcatctccgtcgcacgtccattttggagagccgaaaggcacgactcgctgatcgtgcattgcatgcggagaaagtaaggctgcgagccgctctggctaaagcagccacacgaaattttcagttcgaagagagggcgttagccgcccagcaggcccgcgagcgtctgctcgccgatatcaccgctaagtgcgaaggtcaggtcagacgggccaaaaagaaggccgaggaccagcgggagaagaaagctgccgaacaagctcgcatgcgtctggaaatggcggagaagcttgcggaggcagagaaacggcgcacattatatcagaaaacacaccgccgccagcgtactagcagcttgcccgtcaccgaggagaaaaagatgtcccgggaggtcacaaagtcggttcagcaggatgcggctgcgcggaagatacagcgcgtatggaaaacccacaacgcgaagatggttatgcagcagtttcagtcattgaacctgtctgtggaccgagttcgcgacatgacttttgaagaagttggcgctctcctttctgacagcaatttgctcgacactatgactaaagttctccgactctgcggtctacaggatatggaaggtggggccttgggtgagaggggtgccgtacgcacgttcctcagcagctatctcatcgtcactcacccgcaagaggttctgagcagcaatggagatcaggagcaggatctgattgctaaggcccgggagctgctaatagcctttcatcaggtcacggcgctgctatcgtctggctgttgctctccgtctgtgatcaccgcagatctccagaccttgtgtgaatctcacaacgtgtttttctctgctttccatgcttggaaatcccacgactctagcgtactgattgagatcatggtcgcacagttcgttgaattggaattgatttggcagacggtcaagaatgacaaagctggtggtgccgcagaagactacagactgggtatccgacagaaccaggtccttttgctagcccgcctgaagagacttgcagggcccgagcgacacatggagttgatcagagattcattgaagaaggccaagcgggagaagaagaaggctgcctccaaacaagctatcccccgatctgctgagactgctcctcccaccacggttacgcagagtgtcacatcgcctcttagcgagtcattcaacaacatcgatgccgcagttttccaagagctggataagcagcggacatcaccccacgagagattcaccagaattctcactcctctccctgaaaatcgggagctggtgcatgaacttcttattaacaaagagttcaagatcgaggaagcaccatataccgaaccacgcagacagattatgaagcagatgtgcgatacaatgagacgaggggtggaagctggacacagtaccaactggactgtcgccatggccacagtgatccaagatcgcttgctacgctcactccaacagggaaattccctttatgtgataattagtgaagtcttagatccaaaactggtccagggacagtgcgaggctggcacattctcctatgataatttcttcggcttcatgaacaacatcttaccacgcctatgcgctccttaccgggaccctgtggtcaaggcatacattgaggatacttcaggcgatgctatcgatcggctgtctcggttgatgagcatcattgacctgctgtcactcgaccagacgaattttatgatccagcttgctgcaccccagctcatcgaagaagctccgggttatgagcggcgggcatttgaccgagacgtcacggacgggacagtcaatttggggaaggtccgacggttttggcgcattcatcgcaacataatcgttgatgagatgaagaagcgagacccggaaggcatccagggtgaaccacgcccatcaccaacacgagtctacgcccaaggtcttgccgacaccgttctaagcaatgcgcttgtatccgaagatataattccagagactctgagtctcgatcgccaacgactcgaacggctgcacgccagggcattccaaatcgtcgcaacagcttccatcctgttgacagcaaagaacctactcaagcgagacgcacggtctcaatggaaaccagaagcagaccggattctgtctctggacttcaatgagatcagcgcagagcgagtacagtctatcctcgagtcgacacatccgatgccacccgctgcgagtgcccagctcgcagctacgatcaaacgagtcctcggacccgtggccacagcatgtctcgcagccgcaccccagctcgcggtagtaacttcagagagctctgcctcagatgcatctgtctcctcagcagagtcgcacggagccacaacctccgcggctagcttctcggatccagtgacgaaactcattctctcccgccttcgcagccacgtcctctcgcgtctcagcgcatcgagtgcctccgagcggatacgggctaccaccacggccagtcagatgctcgctggtgcgggtatgccggagtttgttaatgaggttggcaagttggttgaagaattagagaaggtccgcgaggtggattggctttgccacgggtcggtatacgagggtttatacgaagaaggtgctccagcacaatgaaggcgttttagaggggcatgtataatgcagtctatgttttttgtttttgttcttttgttctttcattcttggattttggaggttgggactttggactttggactgggcagactggcagggtatacgactagttcctagagttttgtatggagtaatgagacctttgacttctatatatcctagattattgaaatgttaaacatgtgaaatgtcccatttgatctgaaatttatatacaaccctcctatctaatcagtaacccccacaccatcaaaaatccaacctcaacaccgtatccctccattccattcccctccaatccctccaataccttcaattcccaactaaaacgccaaccaacatgtctccaaatgtcactatcacacacctatccgacctcacacccccctcccaagaacgaacctggctcacagccccgcacccaaccctcccaatagtcgcaacctgcagttcagacaagaccatccgagtctactcccttacaaactttaccctcctctccacaatcaccggcggccacaagcgctccgtccgcacagcagcatggaagccacacatgtcgggggagtccgttctcgcaacgggcagtttcgacgcaacagtcggcatctggcggcggtgggataattacgggcgggaagacggcgccgggatgggaatgaccaatgacaataaccagaccccgacggatacctctgacgccgacagcgcagaccgcgaagaagacgaagaagaatggcgcttcgccgtcctgctcgacggccacgacagcgaagtcaagtccgtatcatggtccgcgtcggggatgctgctggcgacgtgctcgcgcgacaagtcaatttggatctgggaggatctcgacgacggcgataacaacttcgagaccgttgctgtgatgcaggagcacagcggcgatgtgaagtgtgtttcgtggcatccttccgaggagtgtcttgctagcgggagctacgacgacactatccggctgtggcgggaggatctagatgattggggccaggtggcatgcatcaagggacatggggggacagtttggtttttggattgggagggggatgatgcagagaaatggaacgggccgatttccgattccaattctgagtccgagctgagcgctttacaagctcagtggcgttctcagagggcgctttccggcccgcgcctcatctcctgctcggacgaccgcaccgtgcgcgtgtggcggcggcagccgaaggaatcccagcagatgggcgcgttttcttctgccacgacgggcatcccgagtatcattcggcctacggggacagacgaggcttgggaggaggatgccgtgctcccgcatgcgcatgaactgcctgtatatgctgttgcgtggagtaagcggaccggacttgttgcttcgactggtgcggatgggcggattgcgatttatgaagagcgatttgttacaccggagaaggaggaaaagcaggatgatgcggatgctatggatactgcgtctagtgatgtgctacgaacggagtgggtgcttgttggtattcaggatggggcgcatgggatttacgagattaatcatgttgcttgggcgaagagagcagatcggggttctgggggtgaggaggaggtgcttgtctcgacggctgatgatgggagtgtcaaggtttggactgtgacgcggtaattgctttttggaattggcatgtgttgggtctaaatagcttataaacaaaaggcttgatgtatttagagtccagaaaaaggaagaatatataatcaatatgtcacttgagtagtatgatcgcagagatatcagaatgaaaatcatatttagaattaaaccgaagactccagaacaccgtgtgctttatacagatgccaaaaatcattccccttcctgaaaccccttcaaaaaatcacttgttatgaagactggcggttctcaccagtttctggatgcgagacatgaccttcgtcgtcactagcttcgccaacagcgtaatgctcccgctcagggctaggagaatgaagctggtcgagctcactctcatcaaaatcaccagcctcgacatcacgaccagaatgcttgttctggaatctgttgagaatggatgcattgtccgacatatcattatttgagacgcccttgtagccccggcgagtacggcgactgcgccagatgaaaaagccccaagcgatcacaccgataatcacaataacgaggacggcctcgccagacttagcataagcgtgcatctcagtctgtttcagcctctccttctcgttctcctcggcagcggtactgttggcctgtccgccgacagaagtctggggcagcttctcgccgtcgatacgcgaatcggaaggctggccgccaatgctggcgatatcgaccttcatgaagcgatcgagcatgtcgcggctctggcgggggttgtcgaatggaaccatatgactggagttgtagaagagcacgtaggtgaggttacgggcggattggtagatgccagcgggctcgccttcgaaggaccagtcgtggcgcggggcccagacgccaggggaggtttcgaagccgctgccacccatccaatccatgttgtggatcagagtctcggttccgatatggttgcagatgaggtccttgtcgccgctgaagagcaagacgttgatgcccgattcgatcaatcccggaagcaggtgaacagaggggatggagttcttcgcggtgaaggccatgtggaccataccagcgcattctgtccagccggatttctttgctgggttgatgttcagggccttgacgacatccggtcgctggagatacggctcaatgtttttcaggtcagggggccagttcatgccacaggatttggcttcatccttgagacggacatcgtacatgttgtaacattggtgattttcggtggttcgatcgaggaattgttgcaagactagctcgcatgcgccgacatccagtttgttcttcgcgccggcagtctccagcttcgagaggcagacttcgttgagtgcatttatgttgttgtgaaggactgtgcccggtgtgaggaggccttctctctcaacgaacttaaagtatgaagggtactggtctgcaggagagatccaaccattaccgatcagcaaacccttaatcggccactgtgtgcctccgttctctgcaacgcccttgttgcgatcttgaatggcctttgcaatatatggaatgtgctggccggcatacgattcacccgcaaaatatagctataacacagttagagctttaatcaatgtaggggacaaggcaaacgtacgtcatcgttcgcatactcggggaatagctcaaagaacttttccaagaagataatgaagtgagcggccatctcgtcaagctcatggagatagctattggtgttcgcatagctgaaaccggtaccgaccgggttatccacgaagagcaggttggcaaactcatcccacctgccctcgttatacttcaaggtatggtcgtcctgaagtcggtagggcccaacttccatcaatgcgccatccatagagctacatcctgggccaccattcagccaaatgacagtgcgctgtcggttcgcgatatgacgattctggaaatgccaaaagaacaggttgccgttgatggccggatcgacctcgatatgtctaaagtcgtcgtattagaaaagatatacgtccgaagaaatccaacttccaggagactcacccagcatgcatcttcaagaaagggccctccggcgccccgggtaacgagtgcacataataatccgcagccgaactggccgacaccaacgggctcaagagcagcgataatgcggataataacatcgcgacagtaccacccttcacagaagaagggaggaagggtattgagagcatttagcagtccggtgtgggtatcatcagactagaggtttaggtaactagatagtcaagtagagatgtcccgggagggactcgtaggcgcaaatcaacagatcatcgaatccagacgggtcggacggcacaaggggataggagaggagagggtgcacaaagaagtagcaaaacccaaagaaaggagatgttaaggtgttaaggtgttcagagtgtagaatgacggagttcaaaggaagtccacggctggcgtggcctgtggagtattgagtgtaattaccggtcattaccggtggattggacaaagtgcaccgccacttgctgcttgaatcacggtatttattgtattattcgtacgctgcatatttatttgtcaattgggattattaactgcaaatacgtctccttaagatctatatattttgttatgttcacctctaaatcaaaaagtgcacctcatcgccactggttgaccttattatagtttaattttggggatcttcaactagtaaatcagtgtatcacttagaagaaatcaatagacttgtcggcgtccttcttaataagatccaccatcccctgaatagttagcttcttgtttctctcagcaattcaatagtcttacatcaggcatgataggctgctcattggcgtccttgacatagcggaaaggcatttcggtgcgctcatgctcattgatgagcaattccgggtagtcgacatattgaatgtcctcgagtggtactgggcagaatcagcatccagcacatatattgtccagactgtttactttccacactcacccttctcgtgaacaaccaaacgagtaactcgcacggcagtatcggtggtcatctgcttaggccccaatcggcggccgacatatcccttctttctcaactccgaggtgcgatctaccaagtcgtcagtctctcgccgaagtgcatggagaaaaaagtacatacctctaggcgggtcatcacctgcagatgcagttaacagtcaaagggtcagtctgaactcaatctgtacatatcgcggggtaagagaaaaattccataccgaggataccaccgaacaagaagacctcaaaggtatcaccatcctcaggactcaactcggcctcagcggaggggtctagcaagcagaccttttccttgcggtcggcaaagatctcctcgacactgcgctgctcgacctcgagacccttggtggcggctagatctgcgggcatctgcagctcggcgggcacagagctgaggaggaatcgtgccccgcggtcgtgagattcacgcgcaatgcaggcatattcgagcgtggaccatgggcccagctcgggatccagatgctcgactacgaaggttgggcgagtcatggtgggtgtgggagagagacgtcacagaagcggaaaaaatgaagaaatgaagaagttctcaaggttcggttccactgtgggcaggtgacgaggttataattgatttaaccaatgatactattgtatcaagatgagcctggggagggtcatgggaagatttaggatgtagaaggttgttaaatacaatattaatgagtttagtatatgtgcgagcccaccacgaagtgtagtacatgtgcagtaatttatatagcatccaatagtacccagagtaaactagaggtatattctcactataacatatgatttaattgcttcgcgtcgctgcgcaatcataatacacattatacattctattaaaacaaaataatgcgcagttatccagggaggtaaagtcccagaacgtcatctacctacatagccaatagtggccaatggccatctccgatccgtcacctctctgggatttatttaaaaaactatcctattactgctagtctcttctctattatttgttattctttaacctattatttctctataagtcccgtctcaccctctttgccggtcacacatcaacttctccccgccttatctttcccgcttcaatttcccctccacttcaacttctacttcaactttcttcaaccatccatcatgaatccccaccagcagaacaaagtggacatcaacgtaagtacttctattgttattatcatatctttactcacaattccctagtcgttgagcccagaggagcagcgtctgctgcgcctctacggcaagatgcccaccaagaaagacgtcctccagaacaagctcaaggcaagcccaacacagcctaaccccaccaaacaacaccttcctgacatttaattttctatacaggaacgcaaatacttcgattcgggtgactacgctctcagcaaagccggcaaagcctccgacctaggcgtcaccaacatcgggtcacgccacccagtgccggagaacatcccgcacctaatctcaacctcaccaggccacaacaactctgtcagcaatggaagtgtgagctcccagggcgggcagattcccggcagcatcagcggacaccctggctcggtcgggttccaaagccgcagcccgatcaaggaggggggtagctacctacaccgtggtactagtatcagtgagggtgaggcaggctctggtctggcctctgaaccagtgcagagtgagcaggagcttagtgttagcccccctcccgcgagagagggtgttcctatccgtcgataggcgatgacatagtatcttactccactatgggtggctgtggctattctgagaagggcaattgttgcatgcatatcttttgaagggggtctgtgatttcacgttcaaaagcctggcgctatgggaatttctttgtctttttgttgtctttttttcttcttttttttccctttccaaatgtcttttgtgaatgaggggacaggataggggtgcactgcgggacagagcaagagtgagaacagaggcagtgcgtggacttgtgatggtttcaatgatatgactgatgggagtgggaattcactgcccagtcaatcgagcattgcttcgcttttcggtgtcttggctttttatttttctccaattaccatcatttatcaacttatcaccaatctgtggcattcggggtttttcctcttttccttgatctttgctctcctttttcatatctagttcatacgacatgacccttgtttgtgataatttccttgcaccacttcttgatttcattcttgcgagtgataatttgtgtacattgtattcctaatggactatcgtgttatgtgcataacgatacttccattgttttggcttgttatactatccaatttgttcaaaggttataggttatatacatgaaagtcgtttacacattctacggattgtcttactggcgaatctcccattttctcatctacggtagtgtattatatattgtccaacttggatgctctatgtcgtattaggaactcgtctcttgaactagatcatatcaaggatagaggctatataagcaggctgttctcgtacactacatagaaaatatcgctatatcgctatatagctctattgctgtattcctctatggacagtcaagtatgtcaacatagtggatatttgattcggcataatatactccatatggcacaagtaattaaaaaaagtctaataactggctagatattagcctgtaacattctcatgttctagcgtttctaggccctaaatcagtttagtatagcctaggtagaaagtggtcctccgaccgctagtctagctgtaacacttattaaaaagagatttcctcttttctcatttgaacttctctttcttgtttatttggtttatttgatttagtctattcaattcgattttgtttttttcaggagtttctactttcacttctctccagggctgtcttgcttgacccacgtgaagtgttgtgttgaaagcgataagcttagaggaaaaaaaaaagcaaacagtgtctccccctcaacttctctctcccacatccagctctgaacacgacggttgcttcagatccccccattccttcgatttccttaccgcgtacccaaccctctcggcggtccgatgtggctccttcgagtcttttcgtcggccttgttcctcgccatcaccgtctcctccatcccactagccttcgatgtgggcggcaagacatgtggcctagccttctcactgtccttagcagcattttacttcctggtctcgttgttgaaggtcaccacccctgaccgatcgtggttccgttcctccatcattgccgttctccgctttatacaatgggccgtcatcctggtccttctgatttggtcgctgaatcgattctcggttgatgccgacagtacaggcacaggatgggcggagcgcactttcagcagcaaaagggcgcaggattcttctcttcaggaatggctctttggtcgcgacggcctggtggaaacggtgaccctcggcaactgggatcgacttctgagatggtccaccccggttttccaactggcagagggattctgcagtttgttagtgattcaggccgctggacaaatcacccgctggctcgtcaaccgaggtggacgcagcgatagctggatggtatgttttgatctccccgtgggtgtctcgattaaaaaccaactcttatcctagatcggcctcttggtcttgtccgctacgattatctccagctcagtttacttcctttggcgtgttctgcaattccccgaaatctccaacgtcgatgcggccttgattggagtttccgtcacatgcgccgtcattctgtgtgcctggggtattggaagtggtcgcggtaacccagtcgaaagctccctcctcttcgcctatatcgtgctctgcatctaccagatcttcaccgactaccagccatcgcaccccgtggaacaaatatcctccccttcgcaggtcggagacttccctccactgcctcccatcatcatggcgtcgtacacaaccctgatgcacgcgctgtctcttctgccgtcgattattcacgcaggcttcaacgtcattaccaccgtcttcagtgctgtcacgccctccgtcctcatctcactcgcctaccgcctgctcgtactgtatgcatcgacgcgcatcatcccagctgtccgcgagtcgggggcccgtgccctttcccaggaggcttccattgacgataccgacgcagcaggccaagtgctgggtttcctgagctacttcgcgccgacaattctcatcgctgtctacaccagtctcctcatgcagcactttgcagcaacctcacaagcaatgggtggcagcggtgaatggtggagcacccaaggcaacggcggtggtaacccatggcggtggattaatcttgcttgcacaatatccctatacgcggtcgagctgtggctgggggaaaccaacgatctcgacaacggagtggcaggccactggaaaaccgactgaatgactacttgccagagtcaacgactgctaagtcaacctgcctacgctttccttcttatcattgccccagcaaaagcgcggcaggaaatccaaaggccaatcgaatcggccttcttgcttccttggctgtggtatattactgcacgagcctggtcggccacaagcctaccaagctgacctctcccgcagcaaccttgacaacgaaaacgccactcagcagcgattcaactggaaactcgccatcatcttagctacagctaccgtagaacgagttcttcggaatggtttcgatcgcctgacgccaatcaccggtctcggttcttcgtttcacgtcactccgcccgctcttccttgcttcctcgctaagcattctcaactgccaaacgagtgtatttggttgtctctgtctcgaggcaaacatcactctgttcaacatgccacaacacttttcacgactcgacgataccagataaacctattgctttttcttctttcttctgtgtcttccacacccactttgaattcccactgtttatccgttcggcacttataccctctgctgcctacgctcaactatcccattcacagcttcccggtttctctttcgctcccctcggccgaatcttgctccatctacacgcacgcgcacccactttgactcgaggccattacttgtacataggatacctggttctttcttctattgtatttcttgccaggcgcttggtggggttaatagatattcggttctctttctagatcgaatttgagtgttatagagcggacagttgtagtcttggctgccaccttgggagctgatagtcacatgctagctttcaaccctattaccaagccctacaacccgatatggaatggcagataagaaacctagccagctagagcgcagcaattaatacggaaagcacgtgaatccccactttgaaagggaaaccccatggaactaggccgaattaggaagccttggcactcttaactatggtattatctaagcaaatcaatctgagagcgcaaattacagaggtttacaggtacaaattaatgagctgtgactgttttccctttcattttgaatgctcagattcaataactacttcaaaatggccgaaaacgtagcaaagaagctcaagatctcgtcccccttgattgggacacacaagtgagtgcacctgtaattgctgctcatcctgcccaacctgctcactgatgaaaacagcggtcacttccacgccgacgaggccctcgccgtctacctcctccgcctgctccccacatacgcttcctcccctctcatccgcacgcgcgacccagctgagctagagaaatgccacaccgtcgtcgacgtgggcggcgtgtacgaccccgccattcaccggtatgaccaccaccagcggaccttctcaacaaccttcccgcagcacgccacgaagctctcctccgccggcctggtgtacatgcacttcggcaaggcgatcctcgcccagaagctgtcccttcccgtggagcacgccgacgtagaccttctatacgagaagctgtacacggacttcatcgaagcgattgacgccaacgataacggcatctctgcctacgaccaggccgcgctttccgccgccggtgtcgagaagcgcttcaagaatggcggcatcacgctcgcctcaatggttggcgacatgaacaacccagaccccaccagcccacccggcgagccccaggacgaggacagcctcttcggccgcgccagcacgctcatcggcaacgcgttcgcgcgcaagatgcaccatgcctgcacgtcctggatgcctgcccgcaccaccgtcggcggcgcttacgccgcgcgcaaggacatccacccctctggccgtatcatcgtcctcccgcagggcggcgtgccctggaaggagcacctgtacaacttcgaggctgaggcttcgggaaccaaggagattgaccccgccgtccagacatactatgttttgtaccctgagaacgctaccgagggagccaagtggcgtgtgcagtgcgtttccgtctccgagagcagctttgagtctcgtaagcctctgcctgagtcgtggcgcggtgtccgcgaccaagaccttgatggtgtcatggctgcggaggctgagaagaatggccagagcaagatccccgagggtgcggtctttgttcatgctagtgggttcattggtggtcacaagacgagagagggtgctatggcaatggctgagcgcagccttgagctataggttttggctatttgatgataattaaagtctaaaagaaaaagcgcatatttgatgaaccgttctatattatgatatctcaaggaaactatgatttatttttgacacgaccttttttcttcgcaacgctgggtctttagacgattgtaaataaccaatttggtcttgcatgaaccactggacaccacaagtgtctgtcggctggagtgccaggaggacctttttaatttggtgtcagagatatattagacgagtcttgatatatctggcgcgtcaaattctgactgccaattaagcccggttgtttctccgtggcaaacgagcgagaagcctcggtattcggagggtgtagaaccaagcccaagagaatgagcctcgagcctttctcagcctatctgtatagcgctccaggcattggagcactttcccaaatgttgaccgaagcgagtgttttgttcctaaagaaggactggcctttcgtgctctaatatgagtccatcggtatagtccgggagtggagcgtctggtaggcctaccgatttggtgaagcaatgactagccctcagtgacgaatgctcaatgcactgatatcttcaatgcttccagtgccatctccggtagtcgacatgtcctttggttcagcctgggtggccaggtcctcgcgttcgcccattgcccgttggatgagcttcgccttcgtagcggcgcctttaagacgctcatccacgtcattgacagcttcctccgtattactcatatccagggtagctggatcgacgagttcaagaagcgtctggagattcctggctagtcgagtgctgtgtgatgggagactgggcatgtctttgcagatagacggatcaagggaaagagtatccgttgtgctatctgcctgcgatgcgggaccttcggacgatttcatgtcgagtctctgtgcccagactaatgccttgccgtacaagcggcccatctcgacaaacttctcgaagcctttctcaacggcgaaaacgctgccttcggtatatccggtagctgccccatccgcggtgcccagctcatacccctcattgtagaattgctcctccaaatcaaggagactatctaggagattgggctccatggtggggatagtggaggtagatatgagtcagagttgaggatgtcagatcgatcacgttttttttttgatatgcgcggggcatgtgaccacttgcttattttcccgccttgcccctccaacaaagacattctcctcttcaacaccgcaagatgacggatccgatattgcccaaagccggcgagcggaatatcctcgtgacgagcgctttgccatacgtgaacaatgttccccatctgggtaacgtcgtgggctctgtgctgagtgccgatgtatttgctaggtatgactcaaccccacacagaatatagaattgcgccatgaaactgactgccactcaacagataccacaaggcctgtggccaccgcacattgtacatctgcggtacagatgaatacggaaccgcaaccgagaccaaggcgctggaggaaaaggtgtcgccggaggagctgtgcgccaaatacaacaagatccaccaagatgtgtacaaatggttcaacatcggcttcgaccacttcggtcgcacgcccacggagaagcacaccgagatcgcgcagtcaatcttcatgcgcctgcacgagaacggcttcctcgctgaacgcaccgccgaacagcccttctgcgagcagcacaactcgttccttgctgatcgtttcgtggagggtgaatgcccccgctgccactacgacgatgcccgcggagaccagtgcgacaagtgtggccatctcctcgacccctttgatctcatcaacccccgctgcaagatcgacggtgctgcccccgtccgccgcgagacgaaacacatccacctcctgctcgacaagctccaaccggatatcgaaaaatgggcccaccctgctattgaaaagggtaactggcccaggaattcgcgcgttattaccgagtcctggttgaaggagggcttgaagggccgtggtatcaccagagacttgaagtggggtgttcccgtcccgctggagggatatgagaacaaggttctatacgtgtggtttgaggcttgcatcggctacctttcgatcacagccaactacacagatgagtgggagcagtggtggcgcaacccggaggaggttcagttgtggcagttcctgggcaaggacaacgttcctttccacagcgtgatcttccccggtacacagatcggcacgaaggataagtggacaatgctgcatcaccttagcacaaccgagtacctcaactacgaaggcggcaagttcagcaagtcgcgcggcattggtgtgttcggcacaaacgcccgtgaaaccggtgtcccggccgacgtgtggcgttactacctgctgaagaaccgcccagagactggcgacactcagtttgagtggggacctttcgtggacagcaacaacggcgagcttcttgccaagttaggcaacctggtcaaccgcgtcatcaagcttgtcaccgcctcttacggctccgtcattccagaattcaccgtgccagagtccttcgacccattcctcaaggaagtcaccgaacacctgctccagtaccatgaagaactggaaggtgcgcacctgcgtgccggtgtgcagacagccatgcgcatcgccgaggcgggtaacggactgatccaagcgaaccgactagacaacgcgctgattgcgaacgagcccgagcgtgccgccgccgtcgtcggcacagtgctcaacctgattcttctgctgtccagcgtgttctcgccatacatgccagcaacctcgaagtcgattctggagcagctgaatacacccttcgagtacatccccagtgtggaagagctcaagtccaccggctggaagcctacttcgctgaaggcgggccacaagatcggcaaggcggcttacctgttcacccgtattgatcccaagaaggcggatgagtggcgtgagatgttcggtgggtcacagagcgaccggaagaagaaggaggacgaggctgccaagcaggccgcaaagaaggctgctgctaaggctaagaagaaggagaagaaggagaagggtcgcgctggtgctcccgaaggtgtagaggcgtctgctaagggtggtgcgcagaaggcctccgttacgaccgagggcgaaaatgatgaggcggttgagaagattgctgatggggtggctcaggttactctgcctacctcgtagattgttgggttttcataacatggcgatctggatgataaaatacatgcaaggcgcggtgtgggggcttttctttttatgattatcgatgagatgttgtgcatgggtcatgaacgatgatcatcttctggccatattgaactagcttggggaattcttcttttttataggtatcacgcatggatgcaatgaagatgttttgtttttgatgacctgatcgacgtcttgatgctatatgttccgcctactcgtaactgctcagctctacgatctatctactccgtacagtgagtcacaatccctagtagatccttccaggaaagaaaatagatgggctagcaaaagaattctcatttgcttaatcaaaacacgccggtatggtaagaatttcattacatgctcgttgtagcgatgggatacgaaagtgattagcgagaaaaatccccccatcccacgcaaaaaagaagaagaaaaaaagccgggggccaaatcaacgcttgcgcgtgctcggtctaggctttgtctcatcaggcccgatagggtgcaacatgaccttgttgacagtctgttgggtattggcggagtaacccttgctccagtcgtagctgacggagtaagcgaagatatttccagtacggttgaaagcggtggtagtgatagggcctccgacagcgggataacccttcagacggtgcttcgcatccttatcccagaagtggaaagtgccgtcggcaccagccgtgctgaatgtaccatggatggggtggaaagagatagcgttaacagagtagatattgcagacatcgcggtttgtaggcggggtttcacggtggcacttgaaggagaagttcgaggcggaatccttctcctcgacgtactgaatagcacagcggccctcgaccgagccgacagcgaagcccgaggcatctgaaaagcagctgactacccgcgtctgccacttgagaggtgattgcatggtcttgtagaactttgttggctgatcgaggttgatgatgttgatgtagcggtctgcggtgccgatgacgagcaatttgttcttgacgtccatggtgtagacacgctcttgacactcgacggaggcaattgcggtggactggcgcaaatcccagtatttgactgtcttgtcccacgagccagtgatcaggagtggggatccgcccacggagggattggggatcatatggcagcttcggatgggagcgtcgtgggcggcaacttgagttgtcgtgcctgaaccgagatcgagcatgcgagctgccttgtcggcaccggcaccgacgaccttggttccatcctataagaagaaaaaagacaatgttagtttctgtgtatgggaactgggctgtgggggaaatacgccgggatggcgagaacgggggtcagcttactggagaccagcagcagttcagaactggagcttcgtgctcgaagagtgcctttccttcactttgcccttggtcgttgatttcgtagatgcggactttcttatcccacgaggccacggccaggtgttcgctagtaggcgagaagcggagatccgagatgccatcctcggggggagtattaagggcgacgtccttagaaatgtcgccggtggtatttgtctggcccgccgaggccgacgacgcgccggcgccgaaaagtgacatttgaaagggcgcgagaggtgtgatatggtaaaggggtatcgagggcgggatgaaaggatgtgagctgaaaacaaagctgaagtcacagctgccaagtcatgcagaagagaaagaaagtccaattcggtagagaaaggaggagacagagaagtcgattgatattgtagctcgccagaaagcgatgcgcgatgatggcagaaaatatatcccaccgccttcgtgcctgtagattttatacttcactcgagggttcttcttttgatcccaattttgtatttgaatttgaatcactctgaacttacatatatatatgtacgcctattctcttaacagaactatagccatgcctatctatccatggatgccatgagtcacgactaccaaggcagcattgccggactgcagttatccgtttggaaaatattttgttagacgatctgattggatgaggctttactcaatggtcgtacttgaggcaactaaaaggataagatttgattcgatcttcactttctaggcattgccgtgtcagtctatacttatcgtatatattaacttgataccgactaggaactatctttaggaagatctataagaagtacttaaactagcgagcgactattcagcttattatactctgctgccgagtcatctttagtaaacaactgtatgcatccataattcacaactattttactaagccaaaaaggacaagaggatatggatatgctggttcacggaccacttatgaattatgaattatgtctttatatctttctagttgttagaaactgtttctgccttgggttgataggacctgctcccaccttgtttgatctccttctctctctcctagcgaacacacaccatacatggggttcctttttcatcactcatccaagagattgttgagattgttgatatatgagtaacatgtctcactatccgacgaatacatgcaatattcaccatgtagatactttggtcaactaggctgcaaatacagtttacaggacattcgagatcggcatgatgaaataatggtcaattaataacgccatagaggaagaaagcttaattacgagcaaccttagaagctcagttgagtttgctggtttgccaccatgttggaatacaaaatggacgtgcattatgccgttaagaatggcctagagtggtcagtttcaccgatgtaggatgatttcaaagtggagatgaaggaatggtatgattgaatttgtagttatagtcaggcgatctcatcatatgattaataaaatctagtcatagagtgtcgtataggtacgtatataagtactaatgtggtagttctagcctaccaccagcacatacgtactcctcttcgtacatataagagtgatctgccctaaataaagtggagccaaatgcggggtgcagcactctgattggctgagagctgatgttgatgtcagttgaaatgatccggggaaggccggtgatattatatttgttttgtagatggtggtagtgaggttgtatagaagagcagagaatagtagagtagagtagagtagagtatagtgtaatatagtatagtgtagtaataatccgtgggagaataatgtgaaacccgctgatacagaggtacttgcttgttatagacaaacaccatataaacagaagtaacatgacatccatgacactgcaccccctctcacacaaccttggtcacctgcctacttcccctctcttcgctccttcttctcttccatctcctgatctttgattcatctcctgattcatctgagagtatattccttatcccatcttgacctttcctgaacttgaccagatacattctgcaaccatgtctgttcctctaaccaaagtcgattctgctatcgctggcttgtctatagccgatgagaagcctgccattaccgagaaggaagtcaagggcaagtctcacaaggagaagcctcacaaggacaagacacacaggcgggcctcatcaacggcagaaggtatctggaatatcaaggaccttggtaagtatccatcaatctcagtaggaaaaccatactgataccgccttagaagagcaaaagctggaactgaccctaccaattgaaacacagaagactgggtggtgggtatctcatctttcctcgcacatagatcagttctcactgacttcggtctaggaaactcaacacctccccatcaactatcgaggacaaggatatcctcaaaatgctcctcgtcactccacccgtcaagaagattgacctccacttcccccttggcctagaggtcaccgctcggaacctcaagggcgtcacaatcaaggacgcattagatgccatctacaaacagttcaagaagaaggtcagtgactctacgatatagaccataaagagtgtatgatgactgacgtgaccccgctaggcggatgacgaacttgacaaaccctacctcgctggcttcgaatgggacaaggaagagtgctggacccggttggtcgtgcatcagaagaaggagggtgcaccacaaccaagcaaaaagtccaagaagaagtccaaggacgaggcatagattggcattagcccatcaacccgggtgtttcatgacatgaacatgaacacagataagtgtccccggatgcccttccaatcccttctgcactttatcccttcacttaccaaccatgataataccgggactattgactcccctcaatctgcaatacgccatttgacttttttgctctgctttttcacagtcccattcggctgctctgtgttcactgcgtttctaatatagaaacaagaactaggagggtacgagggatatttcatattccatctcgtctatcatatttctcttgatcagtcgtttctgcctggcccggcttatgtatctaccctgggtggtgtgccgttcactctttctgacgcctagtggagatcgaatcaaataattttgacaactgtctttttccaatgtagatattgtaagacattatgtagaacccaagttgaggagacaacctgtgattgaagtccaagtggacatgccaagccacactataccggttgacatccacagcttcatatcgacatactatacatgagtatactatagatccatgagaagacggaacagatcctagtcccaaagtgacccccaagacttccgctccctcaaaaaagccttatccgagtacttcggcaccatccccatcctggtatacgccgccttaacattcttcacaacatcacattccaaagtcgaagattccacataataaccccgatctctagcctctcccagacgagtataaaccaccaaatccagatcgcggacgccgaaaatctccaagcccccacgcacccgttcaggaaggaattcctgtccccagaccatctccgtcgcagagtattcatcctgatcccacctgtccccgaagacgagagcttcaaagacgatatccatccgcaagccaccggctgattctttttggtcgtccttcagggagaagattacgaatgtcagctagggttctttgcaagcgggaaaatgatatatagatgtaatgcgaacagatagaaaggtaaatactaggtaactaaatgtatctattacgtgaaaataaagtagagctggacactcaccaacgtttcataaatatacaaatactgtccgccatgcccgacattactccttagtagcgacagtgtatacacgggcggctgctggaccagcatacggcgccagctggcttctggcctgataaatgcatcccatttgcgagggtgcttgaccatatcgaaggtggtgaatgtgagattggaggtcgaggtggaggtgcagggttcatttgtagtgttggtgtcggtatccttcattttaatggtctttccattgctaggaccggattggtggaagattgacgggaaggtctctgctagtagtgggttctgggtctttggtttcttcaatgcattgtcgagaggtcggaagaatagggcccattgtatgggtggcgaggagtcgatgaaattggtccaggcgtggcagattcgggttgcttttgtgaggagggtgcgggtgtccaggttgaggaggattagttcgaagatttcggggatggagagggcgtgagtttgggctgaggttgggggagtggccattgaagtttaagaagaagaggaagaagaagaagaaaatgagctgaagctcagtctgggggattttaggggctctttgttgtcagttgggcacaattgagcctcatcacatgtacacgtgatgatcatttatcttggcgagattatgtggattttggatgtattagatgtgtagatgagcgggcatatttggaattatgtagagacggatgtaatggagtatatacagtggtttaatgaggaagaataaaacattcatttctcatcgagaacggcccgaactcccaaagagaaccaaaacaatctcgtcaagaatcgtaaaaacaagatgggtattaagatgttggttattgagcgtagcaaagatgcgacgggcagcagcctgtgcattagctctgccgaccacattacccgctaaatctggaatgagggtagccaagaccacagtagcctcggcacgactattgaaacgatctgcggctgaacgcggaggggctttgcgaagcacgccgccgggccagagcgtatcgcgagcgagagcaaggtacttgagaagggactcatcctgtaccaggccgcgtgctccctcgcggaccttgcgctctattgtcccgccgaggagctggtgcagaacaacgacgactgcacggccgcgcagccagttgttgccgcggttcagctcgaaggcttcgaggaagagatcacagatgggcttgatgaatggctcgagctcgcggtcttcgaaggcgtttagttccgcttcggcttcggctgctgtgacgacgtcttcggttgcgacgccggattctgggactatcgtgctgatggcttgctgggtggcggcagatatgaggttttggcctgcggtagatagttggtctaggacgccaaagttgccgaggaagtcatccatgccgtctgcgacggagttgtagatgcgtgtgacaaggtctcttgtttcaccctcgttgtcgcgaacggtttccttacggggtaggatggcacgttcagagaggaatgcacgtagatcgcggctgcggcagacctctggcagaaggaggagtttctgcagataggcttcgagagcgagtcgccgtttgtgaaggaactctttctgtagcttcataacgactcgtcgccggggaaattccaagttccggacggaggggtagcgttggcgtagcttttgatgcagatcatggaactcgctgtatcgtcgtgcaacgacccacgatgcggcgggcatttgctcgccggcatttcttttgacctccaccacgtctgaaataactagttagcctggaacaaactgtgcagtatgaacgtctcttacacattgcaaattcacggccatcgtcctcctctttgcctacgacggtagacttgaggctaacggtcgatcgcccaaataagctgttatcgctttcctggagaatgtactgttgccgctgcatttccttgcggtgcatttcacgctggatgctggccttggacttgcgcaggattctcagttccgcggtgttgtttgtcagttctgctttgcgtgtcaatgcttggactacggagtcctgggctgcaagtttgtcgatatctactgagagtgcctcaatcgcctccgttagacccaagtcacctggtgcagcttcgtgcacttcatctgctgggtccttttcatccacgccgtctggttcttcgtattcgtcttcgataaatttctgttgatctggaaataagtcgtcatcaaagaccccaagtcgtgacgcatgatccaccaaaccaagcgatgcgatgcttttcttggttctttcattccggttgtcaaccgaaggagtttcagacaagctgcgcgacgaaggaacaggacggtccgacccgaatagaccagcagcatctcctttgaggtcttcgattctcgcatttttcggctcgttggtaatgatatcattgagtgctgcctccatcgtctcgagaacttggctttggctctggccatcattctcgccattctgcgaatccttgcccaaactatgggtggatgtggccagattgtcagtgtcatagtcgtcatcaaaaagataagcagatcgttctgaatctattgatcgccgtaatgaatcatcatcatcaaataatttccccatgccccgcacatcaccagacgagacagcggctcgtcgaaggtctttggatggtctcaatcccggctgggaactggttctcgacaacaaagggggcagaggtcgcctctcgggagtttcaaaagtgactgctatgggggaggattgccgaactggcgcctgggcagcggatgcttcgtcggacgcaatatacttccagtacagatcagaccccttgaacttcgggtaataagtatcctggagacgctctagaatggcagactgggttgtcaaaaccaccattcgcgcttttcggtattgttccggggtggcgcgctttcctgcactcaggaatgccttgactgctcggcgagactcttcagagacattcagttccggctttgaaaggtaggtttcgctgatgagagctaggtcgtttctgtctgctggcttccatgctaataaagtaggcattggctcatctccaaagtcatcttcaagtgggttgcgcaatccatctacaacaacccagaattgaacaagcgacatcagcttttggcggtccataaactccatgaaataagaaagcccagatgcactgtgcatcacatcaatcagtgacgattcatgtgttctagatggagcctcaggtcgaatgtctagtgctggaggtacatgggagtcctcgccaggtctcgcaagtttcgccactttctgatcaagaacacgttttcctgtttctagacgcttcagatagacctgatcctggccctcgaccacactctcctgcttcaattgactggaaacgagggcgcgaaaacgacgggcatcggagaggttattacatttcctaattgccctcacaaagcgctcaaaggctcgctctgaatcggctggtgacagtcgcgggaatggttgcccacgcttagacctaggtgcaggtgacgcatgctggtctagagcggcgcgcagtttgcgtacagtcttccgatcctgcagagctgtacggccatatgcttccattaattggttccatgtgtctgggtccgacaatgaagtgactatcggaataagcacagcgcatgagatgatttcgcgaatcagaaccgacacaattcgactgtttagcacgctttcggggaatagctgtggtagaaggccaaccgctagcttgcgcaggtactcctgttgaacagtcttttgatcggacgccgaggtcgcaacggcaggatgtaagcgaccttcccggtatttgttcgcaatggccagatcaagctctccagactcggtcacatttcgactgagattgcgtccccgaacagaacgctcggcaatgtcaaattctctgaggtgcgatgtcacgataggaaagatacgcgatacgatcagcgacaccatatcctccgcaaccaacctatcccggaggttttcaagagcgacgcgaatcgttcgatcaacttcattggcaaatatagggttcggactgatacttttgtaccacgatgaaacaaagtctcgagtaataaaagacagaagttcgtcgattccttccgacacgacaaaggactggggatagagtggccggggacggtatcgcgtgctccggcggacattcagcacttcctttcgccattggttaggttttatgaaagccaccgaaacgttcttgaggttgactctgtcattctgatgccggattgtgaatgtgacaattcctaaaagacccacagaagctaggacgacgcccagtgtcaaggcatatcctagataccggaggatcggcagccagcgaaccacaagaccccaggcgatgaatacgccgacacccgccagaactaagtcgcggcgactaagggccattctccccacacttttgtcagagttccacggctcataacgatcactcccgggagcttgggagcgaacagctcggcatagtattatggggcctggttggcggggaagctctcgttggtatttagcgtcctggaatggagtcgacgcttggtggggcaaagttcctaggagtcagaagagataaagacgtgtatagcaactgtaaaggcagtatcaatataacagccaagcaaagagtcgagaaagagacgatcccgtgaccgcgcgggagtgaacgtcatttgtgtttacttaagctgttaatccggggccggcgcccatcaacttcgtctttcccctcttcctcttcctcttcttcttatcttcttcttctattctgttctcttcacttttcctgctttaacggttctctgcgccatggcctctcttacggattttgtcgatttttcctctaagcctttactatgtgagttggcctctttacgggatctcaacaatttgcatgtgattgaccccaacagggtccgccgcgactattgctttcaacccaattttctggaagtgagtgtccatcttagtcgagaaaatttcaatcgcaatggttctgcccaggagtaatagctaacctaaattttctagtattgttgctcgcgcaggttggccgactccatccgaggactgttgcgttcgatcttggctaaccggtgaacagagtaccgtaatcacttcttgacccgccttttcggaggcgcaaaaaatggctgctacttccttgcagtcaccatcttctccctcggaattctccgtgaccatgtctaccaactcgctctagctgaccagcccttctacgctcctgttcaccaaccgattgttggaggtgtcttgtttactatcggttccgtcttggttctctccagcatgtgggctcttggtgtgaccggtacctaccttggcgactacttcggtattctcatggacgcccccgtcaccggattccctttcaacgttaccggctcgccgatgtactggggtagcactttgaacttcctcggtgttgcgctgtaccacggcaaggttgctggtattcttttgacggcccaggtatttgtcctgtactggttcgctcttggctgggaagagtaagtggtcattttgaagcatactataactaaactgaccgtatctagccccttcactgctgagatctacgctaagcgtgagcgtgcgcgtgccaagaagcagtaaacgccatggatgtataccaggattggccgggacattcaacatccacaatccgcacaccaaaagagaggccaggttgctcagccaacttgacacccaaagtctgaggttgcccccgacaagtttccagcgcatggacacatccgaatcttcaacgatgctggacctgtagacgatagacctttgccttgtccttgatactatgagtagaacaggacaaggccccacacgctatgatttccctcacgcgactacaaaagatataattcaatccacccatcgcgccaaacctgaattagtaggcctttttgactcacttgtgattgctgaggatgtacaagacgctttccaaattttgtctttccaagcaaaaacgatatctacagcagacaaaagaatgctcgaaacaattgaataaaagtatttaaatctaatattctagaattattttctcagtgttatataacccagtgtcatcgcctcaatttccaatgtgactacacaatgacccagctactagaggacatgtatgaagaccagggttattccaatctttcagaccatattcatatgatcaagtacgctctactttcttcttcactctcggtcaacctgagtcaatatcttgaaccaagcttcagcaaaatccaagcaaagagtcaattgcgcctgctattttcgccaacatgtacctattaatgcatgttcgacttaaccttccacttgcatttgatctcaggcgatgagtgtgggtgagtgaggaacaaatgagaagtcccttcacagcgtcgactccaacgaaaacaacccagttgactatgaagcgaaccatggctacagtcatcaatttgcacacacatcaaatgcgccagacatgaccttcttggcctcttaggaaggactaaaccaagaaactaccgtggaccataccttgccctatgacaaagacatgtccgcagccgcagatgcatggtggttatgatctcaaggttatgggcacacaggacaaggcttgacctttgagattatgggggacgagagcaacaccagtgatgaggacgaagaaaggcaaaatcaagatagcacgtggacactcaccatgcacgtattgtcttctcttcaagtggacttgcgtgccctactgggatggcccatggacattccagttgttatcttttatgtctggataaatgaaagatctcttgtacatccagaaaccacgtttattatagaaatgagggtatataccgacgccacatgaatcaaagagcccaaagagacagagacagggtagtatgtatgggaatagaccaggacatgacaaccagaaggccaaagatcaaaaagaagaagcaaagaagaacagcactgccaacagcccatccctcactgccgccttcccctccccctcttcccctgcgtccgactctcgtcgacagtctcaatctcatcctcatccgttcccttcttcaattcctcaccctcagctagcccccactgctcacggtcataccagtcctcgccatcactcatctcgccaacgtgtccctcagccttgcaccattccagaacatcacctttcatgcggcaagatctattcagcgaatcgagcatgtgctccaccccgcgcaccgtctcttcctgcttctggatatacgaccagagcaggcggcgggtttcctcggcttcagcggcaggtaggccgaaatttgggtcggggaggatgttgtccgggacgaggaagagggggtgcggtgttgggagtgggaatgctgagtcggaggagagcggggagccgttttcgttttcgtttgggttgactgcgttggcttgcgcgcgcgttgtcattcgccgtagtggttctggtgagccgtcgtgcatttccaggtcatgttctgtgtcgtcgttgggttcggttgtttcgacgggatcggcatctttcgttgtgtctatgtctggtctcccgttggagggtgattttgtgctcgccccggatgcaccgttgtgattggaagtcgagatgttagggtgaggtggcaggtctttaacggtggcatcggtctcttctgacttaagctgcaagccgttcttggtgggttcaccatctgctgggacctcggccatttccacgtcattttgcgttgaaataacctgggcttttgttccgttctgtgccgactgagggtcctgggtggctgttgatgcaggtgcctttgtggtaatacctgtccgaattgtaccctgctgaccggcatatatgctcggttcgttactagcaagcctggggtcgaagatcaagtgatcgtcaggcgtctcgagcacaccgcatggcatccaactgctatcacctagaaactgcctatgcaaactcctggcgcgccagagcaaagcccgttcctggcgaagcttgtgttcgactgccgctgtcattttctccagggcttgcgacgtgtatgcttgggacatagaaggatggatggggagttcggaaggatgctttaggggacatagaagagctagaaagaagaaaagaaacagatcagtcatgaagccacagacagtactcaaaaaaagaagtagaaaatcctactctcaagcgcaatcccagagaacgggttgtcttcagcagccgcggcatcagcctcggaatcttcatcatcttcatcaagctcgtcgccctctgaatcatagcgaatcgggttcggctgaagaatgtagcgcgtatagccagcatgatcgattctctaatcaccggtcaaagttaggataccagcttcgtcttatcgccacagcacccaagtcccgaaataggcaaaccacgcacctgcttgtagtaatcttcggcgttgatgtaacccagtgcaccctcgctcacatacttagcattagcttgcattttgttcccccggttcgttggcgccatgatcggatcgtctggaccattatctggggaagaagtatgttagaaaacaatcctgttgaaaagacagactacttagtttgtaactcaccgtcacgttctctgcgcaaggcccgcttcatgcccgtgatggtatcggcgattaacgccgcttgcgccgtcatatttatggtgtcggtaacgaggctgtcgggttagacaagttgatttgcgcgtttgagggggttcctccagtaaaatgaggatgtggcagtgatctcccgagcagggaaaagtaagaggatgagtatctcgacgctggggcctcaattataacgcagggaccaggggaagtgagctgtaatgtctttgagtgactgtgatgaagctctctggcggcaagacatgcggatcgatcgccgctagccgatttaggaaatccgggttatgtgataagggctgaacacgtgacataccctcatctatgcagagtatgaagctgaagatgtttattttatatacaatatttgctcatatgagacaatccaattcatctacggcatgtctctcagatcccagttatatcattcaatcgtcggcatcagcccataccagaacccccttcttgtccgacctcatatcccccgttggaaggacgcggagcgttttgttgaagtaggtatcaataaccaccagctgtggccgaatccataagccacgcttcgctgcaaacagattaaagaccactgtatgacggctcagcggtacaagctgcacaacggtgctcttcggcccgctaaaggcaaattgctcgctagcttccatgaccaggttgaacgtaaggaagtgggtagaggggttctccagtacgtaattcaaatgaatcaaccctgccatattgctggatggggtagccgatgcaaggactcgaggctcgcccatggggacgacaaatcgggggatatcgaggacggtggttgtgaccgagttctctgcgtcgtcggaggacgcagattcagatgaccgccgacgccaattgacctccaatgcacaggtaagcgcagttggtcgacgatctccgagaaggagcttctggatatcgaggcagaagttggattctcgcaattcttctggtgcaatatgggatgtttctggagtgacaagctcttctgagtgtacctcgcaaatagctcccccgttggcttcgaggagtctcagggacatcttgtcaattacaagcggctctaatgcaaaggaaactaccttggaattgaggcaccacttctggaacaggcctccagggcttggcgcagagccatcctcgagtaagttatcgctaactgcgaagaaattgggccatggctgagggtggattgccggcaagaactcatagttcgcttcaaacggccgaatgaatgatagggccacggtgatattcttcataattggtgtctggatatcagacactaaatggtacacagccgaaacctccaacgtgaaatccgtggcctcctgggtatcggccagcacaattgtaagagttttgttagaagagcgctccagaacacccacagctcgtttcaagtaatgagaaggcccctcagttggggtgctggcgcctgagtcagggggttcggaactagaatcgtcgtcaagccactgtatttcagctgtggattcggtaccgaagagtctgatttcagcggatacatctgcagcttcgtcttcttcattgtgtataccgatctgcagcatcaccctttcattggtataataggtagccttcagattgggagtagtgaggcggatcttgggaggcttaggcatgaccttgcatttgccagtatcacgatccttgcccactcttctgcgggtcacgcccttttgcgtctgctgccaccagaacgattcacgctggcctggctcggtgatcgcataacccaaatcgaattgctcttcttcgatcagcatggtgattgaagcaaccttagcttcaccagcttcgcggggaatacaggtaaggttgaagaccttggtctgggagggccccagagtcaaatctgctataccgaccaatgcggtcagtccaccggccggggattgaatcgcggtatcagggttgctcggctcgcgtagtggaagagttgcgatgcaacatggggttgtagtgtcagcatgctgatcctggtcagactgaaccttcactgggcgaagacatccttcgaaaaccagtttgacttctgagagccggataggggccgatgatttatgagcacacgaggtgatggcaatttgggcctgtagaggttccccaacgttaccattggatttctcgaacaccaacgacgcggtcactttgaagacgggggtcagtgtaatctttgaattttgggcttgcaaacttacaactcgttattacatcctctgcacgaaggataagagaaggtttgggcttttctaaaggtaaaccttcaagactcctgtggatgtcataatgccatgcgggtcttggtttgaaagctatcagaatgaatgttaatactgaaaacgataggcacaagataaatggaattaactcacttttattcagcagctcccagtccactcgcaaaactgtctcgctgtcctgaaccctgagggcactttctctgagcgcccatccgaaattgaccatcagatgccaccaccctgagcggcgccagctaagagtagaccacagcggtcgaagaaggccatgcgcttcagaccaggagccaatacgcatatactcctcggccgcctcaagactcaagctctcaactttccttgtttggtggcgtttcgcgaattcctcgatagcagctttcagcgtattcaatattaggcccgagtggtcgaagccagttcttccctcttggggtgcttcagcataagggccgggaacaagatatgtgtcatataagtaggatttgtttgcgagttgtgagccaggtgattgcccagggggcttgcgatcttccaaaggaatcttccgggcaagcgcacgtcgtatcattgtatgcttcgctgaacggtgtagccagtaaccctcgtggtggagattttcccaaggcctgactctttccccggttggaatcgatttctcgggtaaagtatagatgtctccaggttgttcagaagatatttcgctggagatggacggaatttccgctcggcggataagctgtgccattaccatcgaccaacgcgcctcccaggcctcccatccgtagtttttactcccctttcctctgcgattgacaatatcctttacgcgaattctgtgatcaacccaaagccgagctgcggcagtcgtctgtcccgtccataacaaacaacgtataatccgaatggcaagggcgtcggccaggagacgcgcatcgttgaatcgaggattccagcccgcgatattttcgaaaacttcatgtccaaataaagtgtcatacgcgctctcatagttccgacaggctgcatccatttcttgacgaaactcggcaaaaattccaagcttgaattcataccttacgttccagccttgggacgatagggtttgagatgttccagtcgttggcggtgcagtcggaggagggatgctgcccctatttcgtttacgcctggcatgtttagacagatcacgatagtattcaaccaccgacggttgcagtagagagaagagtgatttcacaaaatcttgcagttccgacgaacttgcgtctggtgggatcacaaatatcgacctgggttcaaggtttgttgaccgccgaatccccgcaatgcggtcatcaatctcgccctcatagccaccttcttctccgtcttctgatatcagaacgaccacaaatcgcgtcttgtacccggaggattgccattcctttttcaagctgttgatctcgatcttgagttgattgtctcgtagcgaattcatattcgggtctaacgagaatggaaagaaattgatcactgctgccggaaccagttcttggtgtttagttacccatagaggggtgagcaagccatctgggaaagttggggaacctggcgacaaaggcgatattggcgagtggaggacatagtgcgagctaggttccgggtgttcattgtcctgatcatcgctgggggtggttggtggtgaggggacaggggggtcagcttttcgtggagggagtctgcatgactgtgttggtgttagcaagtagtccgcagtatgatgttgtggaaccaacaggattggaatcataaagtatcaacgtacgcggccagaacttttgatgcggtaaccgatatttgcagtcgtagtattcccgcttacggtaactctggacttccatggcatctgagagctatcttctagaagaagtaggctccggagctcctccgcaacagccccgctcagatgtgggaagtctgaaaagatatgggtccccttctctgatagcagaggatagctcaaggaagttttagtgtcattttcaggccctgcctccagtcctgagagtaggactaaaggcaggttgtgattgacgtagtcttcggggtaggcgtccattgcgggcaatggcagattcgcagcgcggtcaccacatgtctagaggatagagaagagctggggatttaaggagcaagatataaaaatcccggcgattaatgagactaatgctgaaatatgcttcggagtttcaatgatgttttgggtaagataagacaatggctggggaatactgccatgttgccacgggcggtcaattatgtttacacctatcacaaggatagaagttgacctatgtactagttactccatattattgtgacatacgtagattctacacgcccctatatacataggataatgtccgttgggtacggctttcctctctaggctgccgtcgctttaatgagggcgatcaggcttaggtcaacacaggctcaagtgatctggtgcgtgaagtcatgtgatcgctagtcaccgcttactcacccgcctgtctgatttttcggcattcagcttaccgccatttataccgccttagtgttgaactccctagataaattgtcacgatctatgatagatcgctatgatatgctttatgtttacttgctcgcttactgtttgcatcgtttatctcattagataggttgtttgctagatttctaagtgagaaggttcgaggcttgcaacgtttgcaaagggttagctatttgcgtcaatgccactttctggccatcgcaatgctatatcaacaggctgcttcccactgtgcaacttgcttcttctttgtttcttcatcttcgttatctagttgatgtgcactttcttcttcaagatcgacctagcacctcacataaaccacacttatttatcgtattaactacttcatcgtcaacaactaccaccaccactgtgctattagtgatcctactgtgccaatagtgtttactcaactagtcttcaaccacttcaacaactgctccaaacccagatcagttatcgacctttcgccgtcacctccgtctaagccttctcggcaggtaaccaactctgagccaagccttctcggcaggtaaccaactctgagccaagccttcctatcatggatcagcatacggtactgagcgcgggatcaaccggtctcttttgagcgccgaatccaccaaccttctcaacgatgaggcattgccaagtcaatatctacagctaaacacacggtatgtcttttaggcgcctggcacgattacctcttcttcatttccacctatctaactgagcaaagtgaatatggaaagcggtgggaagtgagaagtgactttaagtgttgctcccccacccaactttccttcgaccaatcgcactcattcatcatgaccttggtcttgcaacgggggtatacaattacggctgcgcccatccaccattaacaacccatcttgaagcggcccatatcattccatttatacttggatcctttcatggcaaggcagtggatatatatataaagatttgggttaatctaaggcgctactttccagctcttcgcaatatgtccctttacctcagaacagatcaattcggagaagaacgttctgatgctagattctcaaatttatagggaattcggtcaattcagactcatttttgaagcaaccggaattgctcaccaatatcaaatcaagacctttccagataccgctacagggtcaatacaatttttacctagaacacggaagttcaagagttcacaaaagaagttgggtacttccagatcctaaacttctcaaaattaacgcttgcattggaaaatttctacatatgagtggccaggcggaggtaatcgacaaagtcctgggtaattttgaagtctgtggtgggcttgccccgagtggaagcaccaacatcgaagaccttcttgcactaccctcaaaagccaacgaaacgtccgattcgcagaagtgcagagaagcaacgtcctccggagaagcaaggacgcctacgggtgacatttgctgacactgggaataaaccatgggcatactaaattgcataatcggttatcacggtcgcagttacatgttaggccaggtgatggaccggccactatctttagctaaattcttagttctgaattcatcaacagagagattcagtgatattgttctgctgtccttgttttccgtaacagtcacatggggctctagaataatcatggttgacaattatctgttcgaatatatagatccgagatatatatttgtttactattcttcttcgcgttcaatgttggattcgaatttatagtacctggagcatgcatttctaattgggagctgggtatttacttattcagtacatacagactctgcagtattattctaacatgagttgaccagtatcctcgtatagcctgttaagcctattaagggggtcctccaaaaggagccatttggaatccacgtggaacctcaaatacttagacctccatagctgtgaggaatctaatatatccataaatacacagtgtctgaggtagttattgatattctactccctactccgtagtcccctacttatatatcttctatcggcaaattaagatcctcagtggagaaaaaggcgtcaacgctaatctccaagaaaataagacaactcccttttccttcccttaactccagtctataatatatttttcgctctctcttttcatactcggtataatcgggatcctttctttaatcttcttacgctcactcccaatccctaatttttttggctatcatcaatatctcactgtaagggggggttgacaaggttacaaggaccagaaacccttatcaaacatctttcgcatgcagtagatcatgcgtgtacccattttaccctgcatccgatccttgaagtttgtctgtcttagggattgcacccttagactattgaacaatgtcgaacgagaaccccgtgcaagcagagtcggccctgcttagtcgtcgtcgccgtcgtaaatcgctgccttcgcgcaatggaactgatccaacctcgcctgaagtcatttcttctctcatttcgtccctttccaccatctccgttcctttaaattcgcactttgacaccatcccgaagatcgacgaatcagacccagcgttgccagaagtaccgcgaaccgcgccaattcactcccttcctccgtctgagcaacatgggtttggaatgagttacggtaactacaagtcagcggtagagcaacccgcgctaccggagaatccatttttacaccccgacgatgcggcctcgtcgcctgtcattcgcatggccagggcacccccgtcaccaaagtcgccccgatcgccgagattcaaacccttcaaaacgactgatccatcatccactcgcccggcttcgagagagtcctatacatctgtgataggcgccccagagccttcttcgttcggaacgatcagcacagagcctggaccccgtctgtcaaccccgagcatcgcttcgaatagttctgcagggcgcgcgaaaagcctaaagagtcaatttagtcaattgaaaaggtcatcacgcgaattactctgcgagaaggatccacacgtcgatcgtctgcgaaagactaccagctacaacgacagtctacgacacaacatcccgcgcagccgagcaagcttgcgctcattgcattccatggccgaggttagagaggaggcgcgtcctgcggacgtcaaggaagagccatacgaagcgaaagtcgccagaactccaccaatcaaagattaccaatcgttccacgataccccggatgctggcactcccggcggaattggaagcggtagaatcatcccaactcgcgactcatctctgcgccatcggaatagccagtcatccacctcaaaaaaacaccggtctgcgcatcatagtcgatactcctccacggctagcaaagagcttaatacagacaatgggacaccgggaacgaacaatgacgcagaacaggtgacccgccggatccaagagttgaaagaccagcaacagaagatcaagaccgagttggaagtgggaaacagccctgaacacccgactaagacgagccccgtgaagcaaacaagggcctcgaaggcaaaggcatcgcgcgttctaggatatgatgtcgaccaggccatgcaggaggaaccaggccgcaaccatccatctttcagcgacagtgcgccttctccaaacgtgatgacggggaaaaatcgcaccgggagccggctaggggcaccaatcacaccgaagtctacccacctaccaccgcagtttcccaagtcacccacggaaaacctggattctgagagagctagatacagacagtctctcgaaccaaacacccatcgccgcaccccatccggtcatctgtctcatgtgtcaaatgggcgcccctcgtacagtaccgaacgaccatccagtgccgattcaattgatctcgctgttgaagactacgtattttcgccgaagctgacccagagagtgatccacccaaccactggccgctccattgccttctctgaagttggccatccgaagggccatgttgtgatttgctgtgtcggcatgggtctcacacgatatctgatggcgttttatgatgagttggctcggacgctcaatctacgactggtcacattggaccgtcctggagttggggagagcggtccacaccagggagacgagccgagcacccctctaagctggccaggtaagcaagactgtcgagacattttaatattgcgctaatcaataatagatgatgttgcaatcgtttgcaactaccttcgagtgaccaagttttccatccttgcccattctgccggcgcaatctacgctcttgcaacagctctccgaattccgcagcatattcgtggccgtatccatctcctagccccatggattcccccatcccagttgtctaacctcggttctaagaaggatcctgcgcctaccaacgcggtcccttactcccaaaagattcttcgtgctctccctacatcctttctcaaagtggctaattcaagctttatgagtgccactagtgccagcattactacaagtttgcccaagtccccgcgacggaccaagcgcaaggttactgctacagaagcttccaatgcgaatgccatccctctagtaccgcctataccttctgttgaaaacaaccagcagacccgagtggacattttgccgaatatcaaaccgttcgcttctaccaccgcttcgtacataaagagtgaaacggctctcgggtctcgcgcaaagtctccagaagatgagggcgaacggcagcgtgactatgatactcgtctcacctacaagatctgggagctggccaccaccaacgccaacccggcggttgatttgctgatctgcctcgagcgtcgccaaacaattgggttccgctacgtggacatcacgcgatcagtggtaatccaccatggtagcaaggacccccgcgttccagtggagaatgtccagtggctcggcaagacgatgcgccgctgcgaggtccggatcctcgaaggcgaaggccacggccttatggcatctgctggtgtcatgggcaatgtcttgactgagattgctaaggagtgggaggactggacgatccttgtccaaggcaaacgccgagccactgtcagccatgctgcacggcctggactctcgattcacacttgatctcccttgtctgccatctttccccttttatccggtgtctttgacataacacttcatcttcagccctggtggctcatctttccctaattgccatcgctctcgtttcgacaggctaagccgcagctggtctgcggcttccactgctctgatccacaccttgaaatcctatcttttatccttaccctttcttactcgtctacacacacctactttcgaggttcatgccctctctatgatttactgtcgacatgggttttgcctttgaacaaacgagcccgtctgatttagcataatacccagtcatgccatatactaatcaatattgataattcaacttgacttgtatagtaaaagaaaaaataagacacgaaaacaagcatatattatttacatcatagctccgccaagcaccggggtgaacccgcaaatcagggatgacatacccttgtctccttgaccccacttctcctgacctgtttagagcttttggtcttgtgattgtgagttttggaagattcaagatcgaatgtgcaagtgtcgaatgtccccaatactctaaactgcaagctctgccgggaacggaggaattcttggcttctgaaacacgtcacgttgtctggaagtcagcttggaccctgacgacttggaacattttggatccagcttttttgaaacaatccacaagccacacagctataagcgcaatccgccatgccttcttcccaacggcggcttcgactgatcgtcgttgtggtcatcgcgcttctttttatggtcttttactacaccgtgcgtcaccggatctcccccttccacactgtttcttcagatatctaatacgacgcaatcggatccacagggtgatgcaagcaaaatccaaaaccaaaagttctatcggtcaaccctcgacgcaatgaaagcgaaagagcaagctaagcaggccaaggcccaagagaaaatccagaatcccgtgcatgcgcccggacagaatggcgctgcgggtgcgggtgcgggtgacaaggtgcctgtcgctgcggccgagaaagctgctgttcctcctgctacagggaatgaagatacggaggagataccgattgcggggaggacgaagatgaccgttcccaagaaggtgaatcaggataagccgtcagaggttcagtcggagatcaagagcgaggaggagaaggagcgagaggaaaaagcgaagagagagcgtgaggagaaagagaggaaagaggccgaggcgacaacagagcttaatgccattctcaagcgggctccaggtatgtttctttcccccgttttccatttctggcccgtatccaataccaacaacatccagtcatcgtattctccaaatcctattgcccctacagcaagaaagccaaggtgatcttgctggagcactactctatcgagccgaagccattcgtggtcgaattggatcagcacccgcttgggccgtatctgcaggccctgctcgcacagagcacgggtcgtcgcactgtgccgaatgtgctcgtgagcggaaagagtataggtggtggagacgatattgcggcattggatcagagcgacgagctggcttcgacgctgcgacaaatgggtgggaaatggatcgtggacgtgtcgcaccaggcggttgagaaatcactatgaggttagtattgtaaaacaagtttcaagttttaatagccatagcccatagccatggcagacaattagggggcatattgttgttgcagctcattgcattgtaacagagtagcgaacttgcgcaggaactccaggcagcttaatatttaccacatgtacctctacttgccaagcacccaacttacacctgtggggcaagtactggtacaatcagcgataaggcgataagctgataaggaaccctaatcgcgctagacccaaaatggccctaagcgacgcacaatcccgtgacatccaatttcgctccaccaccaagtccattcgaattttgaacctccccgacatcgacaatctacacccccggcaaccaccaaaagtcacgtcaagatgcggtacattcactccgaggaacggctgcccattctggacaatggtgagcgaatttctttttttattggaggatggaggaagccgatcgcacacaatacaacttctcttttgaggcacgaaattcaaccacaagcctagcacgacacacgatcaacgtccaacaccaatacggcagaagtaggagggaatattgtgtgggatcggcgactcgcacacctaccagacaattctcgattttgattcttcaaaatcttgaattccacaaaaagaaatgccatcaactaacccaaatctcttttcgctctatagtgaaggtccagattaagtcccgcgtcgtgactgtcgagggtccccgcggcaagctcgtcaaggatctctcccacattgccgttaccttcggccgccccgagcagaacgttatctccatcgagctgcaccacggtgcccgcaagggtgttgctaccctccgtaccgtccgtaccatcattaacaacttgatgatcggcgttacccgtggcttcaagtacaagatgcgttacgtctacgctcacttccccatcaacgtcaacatcgagcccaaccccgagactggtcgtgctattgtggagatccggtatggaaccctggaacctacattctttttcgatatgattttggaatcataccgcgaaaaccaaattaagatgaaattagagctaacgttttgttattagcaacttcctcggtgagaagtacgtccgccgcatcactgcccagcccgatgtcgacatcgctccctccgccaacgttaaggatgagctcatcctcaccggtaactccctcgagggtgtgtcccagtccgccgccgacatccagcagatctgccgtgtccgaaacaaggatatccgtaaggtgagttgacaaacaagcatcttttgggaggacccgtggttctgaatctatactaactattcccagttcttggatggtctttacgtgtcggagaagggcaacattattgaagagtaaatgtgccacttgggaatgcatggggtgtccgggagaggtttctttaatttcgcctacttgcatatagggaagcaaagcgaaatgtcaaaaacaaaacgacccttttgaaattcactgattcccttacgcgaaaacgtctttgtatgtggcatgtagaactgtgcgcccgtggcgattctattacttcattactttaatactatgagtattgagtagagagatatatatgtatttgtcgcggggctgtagctgaagatgaagatccgggggaatctggatcgaggtccaactcttcaacctccaacctccaacagaatcccttcctcagaattgagaccattcattttcataatacatctatccttgactacgtataatacttaatcactcaatccaatactattacaccaaattttaatctccaatccctaagcggaacgtgcgtgacgtcgtaacatgtgaaggcgaataccgggcccgcatgtgcacctctgcctccaccagccacaacgcagacatatccctcgaatgaaaatatggggtcctggtggctcggactgtggaatatagttggggcagtctggaatatgctgcttgacgttgctcagttctggagatatgtgagtgttgtgctgcaatcccagtcggagtgtcttatatgcggaggtctgagccggagatagcaaagacaaaagacgcacaagacataaaacatcggatatagtttctgatctgacctcgagctaacatatatatcctagaaactatcatcatggtggcattccaaatcccctcgagatcgactcttctatacgctagccaacgcgaagagctatgaggattgggaagaggcggcatttgagctggacgagctacagagtaaagatttatggtatgagattaaacagagccctgctcaaaatgcaatataccaaactataatctaaccacctacacaggcgccaaaaccccgtcagccgacactacgactaccgactaatcctcggccgactggaagcactgatgagcgcgcgcgagtcagaagacatcctaacactagtaaacctgctccgatcggggctagtgagaaatttgggaaacataaccagcacgaagttgttcacgcacgcgtacgcaggaaccaagcttctaattgacgattacatcacgcaagtagcgctgtcaatccagtacgtgacatccgtaccaggagcgccgatgcatccgagcgggttcagctcccaagcgaagctggagttgctgcacgatacgcggcaggcgtttggacgtacgacgctgctgctgcagggcgggtctgcgtttgggctgtgtcatcttggtgttgtgaaggcgctgcatttgcagggtttgttaccacggattattacgggcactgccagtggggcgatgattgctgcgcttgtggggattcattctgaggatgagttgttgccgttgcttgatggggaggggattgatctttctgcttttgatacgcggaagatgattaatggtggggtcgaggagagctccgactcgggttgggttgggacgttttatcggaggttgaggagattgatgaaaaaggggtatttgtttgatgttggtgttttggaggaatgtgttcgggctaatgttggggatcttacgttcgaagaggcatacgcgagatcgaagcgcattttgaatatcactgtcgtgacgacggggaaaaacgggacaccgaatctgttgaattacttgactgcgcctaatgtggtatgtatttctccccttctcgttgccagtctcagtgatatctaacaccattcctagcttatctggtctgcggcagtagcatccaacgcctcttcctcctcaggcctctactcacccgtgacgatctactgcaaagatgaaacaggcacaatagtcccttggccacacacacaagatgcagtcttccgaccctggcgacacgtccactacaacgaaggcgaatcccccctctcacggatctcggaactcttcaacgtaaaccacttcgtcgtctcccaagctcgaccatacctagtcccgttccttcggtcagaattgaatctcctagaccgacgacagacaggctggagtaatctctcccgttccacaatgcgactaataatggtcgaactgcgccaccggctccgccagctcgactacctaggcgtgctacctgctccggtgagcagaatccttatcgacgagacaatccccgggccaaacctaactctcgtcccggacttgagtttctgggatctaaggaaactgttccagagtccgacgaaagccggcatcgctgactgggcgcttaagggcgagaggggagtttggccggcgattagtgccctgaaggttcgggaggcgattgagattgagcttgatagggggtatcagcttgttaggcggcgtagaccgagtgatccttctgtttcggtggctattccgaagcaggttaacgctatgaatgagggtgttcctaggcgtaggaggggtggtagtgagaatgacgaggggattctcgctgatcgggagtagtattgggttatagggttattttaagtaatgcatattgtttctatatttgtatctgcatgtaaatggtatacttcgtactcggtatacccaacacgcgtagaactatgtagacctcgatacttggtcatattagggtcattgatccatttaattagtaagaatgaactgcaattacaaaattgtatgcatatctgctatccagggctatacatcaatgcctcgtatacaccacaacctctccccattctcaatcaagagcatccgactcaggcggacccttataatctaccaaatgtcagcataaagatctccagcatccagcatcgtccataaaacttacatttcctcgcataaaccacataccaaaccgcagaaatcgccataaacccgacaaaaacaaccgaagcataattcatcgacacagccgtaaccggcaaagcagtcggcatactaaacagcaccaactcaaacgcaatccaagccaacgcaacaacattaacaaacctcccaacaagacctccacaattccacggcgccttcgcaacctcctcccgaccatgccacagactcaaaaagatcggaatagcataagccgccgcgagcgcaataacgcccacagaaacaaacgcggtaaacgcactcgaactcccgagattaatcaacccaagcaacatctgaatggcggtcaacaaaaccaacgcccaaacggggacgccccagcgctcgtcgacgcgcgcccatagtttcgccagcggaacggcgtcgtcccgggcgacggcccaagtcgcgcgcgaggccgcaacggtaatgctaatcgagcagaagactgtaatgaccaggacgagggagatgaggccgagaccgccggcgtgggagcccattacgcgagccagaatgtaggggagggcttggcctgctggggcgttgatgatgtcctggagtgggggcagggttgcgcagatgggaatgatgaagaataggcctgctgtgccgccgacggggacggagagggctattgcgcggggcacttttactgctgggtctgtgcattcttcggccattgaggagatcattcctattgcggagaaggtgtatgcggctggaaggaggccgatgaagaaggtgaagtttccccagccggcgaaggatttgtcgtagtgggctagggtgtaggatgccgagtggcggcctgtgtctgctttgacggagagggcgattaggatgattattattgtgaggagggtccaggatgcgcagagggtgtcgactaaggggaggtggttatttgcaaagatgcagattgctaaggaggtgaggcagactgcgtagaagattaggaggagttgccagtcggatgctgaccaggttggatggtagattgagactgttgctgagagcatggaggcaaagccgaagtttacggagagcgtgatggtccagttgccgatcagccaaatccaggcattgatgaaggagagggttgttttgttgctgcgagagatttggaaggtccagtagtagggccctgccgaggttggatagcgggaggcgagctcggcgagggagaaggcgatacattggtcgaggaggcagacgactatccagccgatgaagattgagaggggaccgccgccgtagatggccgagaggagagctgagccttcgccgtacgggattgctgctatggcgagggtttggaagaggagggttaggacagagcgattgcgacgtagttcttgcttgtagcctagacggtctagttctaggttctcgattgtgccctttccatgatcttggagggagggaggtgaaggggttatctccttctcgatagacatggtgtcagtagcagggttgctagtgagggcagtccgccgttatcagggtctctatagtaggcaaatgaataggaccaagaaggatatacggaggttatatgccgtgcagtcatatgccgaggtgcaacgaatagcatgtcgtgcaagggccgaagtacagatgtaaacaataccatccgaaaggggaatctcgcattctgcaatcgataaagatatacaatttgtggctggtggaataaaacggtaatgggatatgatttaccgattgggagcttcacatacagagaaaagagaatcaagagaaaagggccgacgttcaacattacaaggcaagataagagaaagcttgacgccaggcctaaccctaaaaagcaactatatccagagggcaaagtactccgcatttgatctgcgagattggcttatttgataggcatctacgaagtggataagacaaaatagaaatgcaatagtttcaaggggaaaagaatagaggtatcaaatagaaaaccaccaaaagaaaaacaaagaaaaaacaaacccctaaaaacgtcgaggaatatcaaacattacgaatagtagcatatggtatatacagggaaccccctacatgggaaaagaacaattacagcgctgtcgatggtcgggcctgggacctgcgcgagtgcatactaagccggtgaccggtggccggtggaccctcagtagcgaacagaggggggatactaaatccatatccctcggtagtagcgctacggttctggggatcgatctcaacacggacggaaacgtcgagtccgccaaacatgccgctcgtacaggtgaacccatcagcggcgctgtgtgccgttccggcattgacttcgcccttgtgcagtggtgcatggccgtctttaggaagacgctccagtttcacggaattggattcgaggacaccggtgttaccgggccctggggcgacgacctcggtgaggatggcgtagttgcgggatggcatggtgactttgttccaggcggcgcccttctcctggccgccaggctgcttgtcgaagaaaggcatgagagtctcatcgcattcatggtcgaggtggtggattttgtttctacgagcgaggaggttggcgacggcctggggtgggggcttgtttgtgatagcgctgctgacgacgttgacgatgaagcggtgatcattttcgcctgcaaggttaagtttcgggttggagtagaagcggccgatggcggcaaggtggacgtcgccgccgagaatggttacccgcacgctgttgctgcgggcgaactcctgcaggcggtggactagcatcttgcgctcgtgcttgtgctggcgcgcggtgtagtggtcatccagatcgtcgagtagatccacttggccgtcgaattcattgaagaggccgcctgccaagccgaatcgcttgttcagtagtcggatcggcgcgatcaagggagacgtgaggatgttctcgagccatgctagacgggggtatgcgatcgggacgcctagtaatactatcagatgcttgatgtcgccgtcggcggcgacgatctcgcgctgcagccgttcgaaaatcatatcgtaggtgtcctcgtagttgacctggtgacgggtgcgctctgttcgcgcatctagacctataaaggcaatgcgcttgccaaagcgcatgtagagacttcggctgctctcttccacgtaaggaccgggccgtttgccgatgatccagctgtcgtcctcgacctggttctgcagaacgtaggtattctctacttgacgcgggtcaacacccgaagttccattgacggcatgcatagtctgcggggaatcggtagtgaaagtcgacataggaggggcaatgtggtgctggaagagacagtaatatttgaaagcgacaccgccgataccacggaagacagcacacttcataaaatgatccgtgtatgagccgaacccatcaataatatcatgatcatcccagatattgacctgaggaatgcggccattggcagagcggaatggctcagtgttgtaccagcggacatagttggcatagtagtagtcatcgcaatcagcgcgcatctgattattgaagtcatggttgcgcctcttatgcgggttcgcaatcgcagtccaaggcttgagcgggccatccacacgaacgccgtcattgtaaatctggtcaccaccgccaaccataacgtggaatggcctctcgccatgcaggcgcatcacatcgttccatagatttggccctacccaggcgttcatgtccgtgccgacggaaaagccattgcacgagtggaacatggtacgcatggactgctcttctgcaggaacgacaaattcccacggtgccgggacctggactccggactcgttgtatagaccagggatgtcgtacgcccaacgcgcctcgaatgcggccaccggcacggtaagcgagaatcgccagaaagctttcaggggatcctcgtagagcttgagaccttcgattgtttggtttgttggaaccctgtcggtgccgctctgggcctcaatatccacggcgcctacctggcgcaggcgcagctggggctgctcctgggttggcttggtgacaatcaagatactgccgtgccaggtggttgtagcctggtagtgcatgttcttcaggttgatcaggggaccggatatgagctcgaagcgatcgttcgagccgcgcgtggtctgttgtcccgtctccccattttgaggcatccctgcgattgccgacatgcttcgattagctttgcgcgactttccgattgaggactggggttccgcgacataccgttgacaggctgcgcactgtactcggccataataataatagaaattgatgcgatttggatatcaccggattgtagaggagataaataagaacgtcgactgaagtcgcatagattatcaagattcaaaccacaattgagcgaaatgaagggggggtaaacagggatagaaggaaggaactaggcgtacttgaatgctatagggctactaagtacagggctgaaaaggaaaacaagaaacgaagcgagattggaagctgcagatctgtacctttgggcccgctggcttggcaataaaggaggtcgctgctcaaccccgatgaacagccctgacgctgccaagactttccggtaattacctggccaatgggagaggagattatgctagccactacccggttgagccacctcgcgccacataagtggtttctggctattcctgattgggtcaggagtggtggcggtgcaattttagctttgatcgggttacataagtgggtttcttctgattttgaaggttttttgttcaagagcatcttccatatgatcaaatatgtacttcgttggtactccctacttaccggatgattacacaggcttctactgcttacatgtcagatttctccctatgtatgaccccgctaaatacgtggcctatcacatccgcttactatttactgatctacatgtggagacatccatacttactatactaacaaccatcttgaactttttgtttatttgcaaatttgaaataatatcaacaaactggatcagaacatccctacacataagacacggtcgcgttcgaagatagaacagaggcaaatgatcaacgtagcactcaccaagatctggatccgcagatttaaccgtgaccattgatgcgagtggcctggaacaatcttaacgggacgaggctcatcgttttcagtcccctcagactcatctcgcagcacaaacatattctgtccatggaacaaaccagaagcaacaaccttcttcaactgcttctggcgatattgctccatattgagtccatcacgaacagcaaaccaagtgtcccgggagccagtcgcaagcaattccctcagttcatcctggaaaggcgtataaagctcacgaagctcatcaggctcctcagccagaagctcagcaaagtcatccacaaactgcaagaactgcagggtaacaaccatatccaaaccagcctggaactcgcgcgtaatgaggccgtagtggtgcaggacgccgatttccagaatctcaatctgatgttccatagtatagcgaacaattgcgaggaaacggtctacgggaacgtcaatcacgagctccccttcaccctggttccagaccttccagagatcctcgtagttctcgatcggggcctcgggctcgaagaaataaccctgcaagcggtcggactgtaggtcgaagccgagtaccaacctggcgttgctgaattcgttctgcatgtcgggaacggggaggctcacgaagattactgttgggtttgtgtgggttgggagattgttaaggactggctcgtcatgtagggtgacttgtgtgaagccggtggtttctaggaggtagcactctttcttacgacggagtttgttgcggccactttcgatatgtaaaaggtagatgtagtagtcgaccacaccccatggatggtgcatgtagcggttcaaatgagatgcgaagcatacttcattgggggttgcaggcctgaagattgttgggctgatatccttgagttgggaatcgttggtgaatgggttagacttaggcctcatcaatttagagggaataatgcaggtcatctcatcggcgagctgagagagctgggggctctgcatggctgttataatttcaagccttgattgtcctggttgtcagactagtatctcctcggttgtaggatttgacgaatgagttgattcgagactcacgatggtcgggacaatctacaatgatggctgtgctcggcgagagcctttcacggaggacagaggcgatctccttgatagaatgatgaatagtgaagattaggcacaggagcaggacaaaactcttgagctccaggcgtgcagagaggatatgggagaagagctcggcgaagaactgcttgctgctttcctcgtatatgtagtaataaaggatgtcgaataggtagaaagcgacggctgcttcaaccacctgtatgatacagtgaacaagcacgaaagtcacagatccaaagcacagcacgaacccaaagcacaggagaaacaatatccactcggtatgtgtagaaaggtcctggaagaagttagtaaaggccataataggcgctcgcaatagggggcagcttacaatgtagagtactgtttatgtgcagtgtgttgaagtatgaagctatgggtggcgttgatagtcaattaacttgtgcttctgttaatttgctgtgttgagatggctgtatagaattctgtctcgattcgtagagaggaggtttccttttgtacactggatgaaaaggccgtggacaagtgatatgtgtctccaccgaaagaaaacaagagcacaaaggcatcctaaagatattcttctaaagccctcaaaggaaatctccttcgagatttgacaggagtagaagatacaaagagcataaaggcattcgccgacaaagttcttgtcgggagggttccttttgtcaagtactctatattatttgacttggtatcctaccagtaatgcccttgtttgttctttatcaccgagtatcaaagggaagagaagcccagggagttgtctttgtgaaacacgaatcaagtgtacaaagactcgatccaatatcataagagtagccgcggccggcctttcaatgtataaccggggataagataaagtaccccatatcagccagatcaacgtttaatcagctaggatagcattaggtcttttgtcgagaaatcaagagtgtcacgtagacatagactcggttcagggcctgtaaactcgatcaaagaagagacaaggccattctattctggaaataaagaggctttgttcctagccaagactgagtttcattgtgtattagatgttcgcaatatagataccttatcagtcttacatgccaggcatcacctagcaaatatttccttcaccgggaaccaccagaatctatgtcctcacaagcaaaggccaagtcccccaagtctcattcaatccagcaacccattccaccgaacatgggacaggacagtgtattccttgtgcggtctgattatttagagagttttgacgatgaaccctgggtcgacgtaggttctcagttcttggaggatccggacaacgaggaagctgactgggtcaccgtaattcttcccgaagaaatgaacaagacccatagcgacgaagatatcatgaagtatgtgctacataacatccgaattagacgagccgtcgtgagccaagtggcactgcataatatgggagtgacttgtatatcgatcccgatcccggtcagcactgctgatactgctacaatcttgatttgcgccgaggccgacggaaacaggtggctagaaatgatttctaatggaatggctacgcttcgcagagaggtgatttttgggcgtcggtgatctgtgggctgaatagagagaggttgactgattagctatattgtcgataccagggaggtagccaagtaggaactaaggattgttgtccggcagactctgagaattgtgtctagaatatcaaatcttgtccaaatggtcaaaggtgtcgaagggatcgcagtagctagacgagagttctagtaagtccatccaagtactgaatacctaagtaaccaaataaatcatatacaatcctcaagtaccaagtacctatatgtgccttccttttttgggttccttgttaccccagttccccactgaaaagtattctgattgcatttcattcatagctgtggccatggaataaaccgtaacaaccttggctttcttgctcctcaaagaaattctttgttcgtagttattttgggtaaataatagaatcatagctgtggctttgaaggtcatcatagtcgacagaggatttctccattaattctcttttttaatccaggtgtcctccatataaaaaggcctcggttctctcccgagtgattcgatttggacactattactttcaaccatatacaacaaacaattgttcaaagctcacactgaccaccgacaatatgccacgcgaatatgagccaaatccatttcaatatcactctaggagcagtatacaaggcaagtctctgtttaggtcagccacaacaggcaagttaatagacgactgtgaaagcaacgagacttcatgggtgactgtgagcctccccttcaggatgaattccacccataccgatgaaagactattagaatttgcgattcacgagatccggaggtaccgtgctattgtttaccaaataccgcagcatgcgattaggcatgagtgtatctcgttcgctgtagatatcaatgaggcaggggtgtccctggaacaagtgactcgtgcgtttatggctcaggctgaggttgtcgcgagatactggctgagggagctgcgtgccggtagggtcactcttgaccgagaccgtattttttgtgttgggctttttgatgcacattatgacagggaaacgcgcaactagtatagcattcgatggtctgtaaccaaagaccatgtttagattggaagtatgtactctcgatttcatggaattcaaaatgatattctttctcacatcagtatgacaccgaaattgttatttgaatattcatcagtcacagttgaaatttgtgtagtatcattgtatccctagccccgttagtatgcatgcgatgcgctgaaggagacatcgagggggggattcactacgagcggacccggttgacaggccgtatgttgcacagctgaagacagtagtcatacctgggatatagtagtggcctgtatgtcaattacatttgagtttggaaatgtttggttagaattagatggaggtttagatggttggtaaaactatatatagtacaatgactatgtctctatcaaagaccaaagtcatcggaagaatgaagaaagccattgtaacaatggaaggcctttgttaattctcatacgatactccagatagctcgcatctcaactgtaaccttataagccctcggtgtcctctatctcaccggcatcacccagaaaagcattatcctatcgccaacgaaaaagaacaagaagacctcatcaaggagacagtgagtcctcccagtctcactcaagcccgctaaccaccaagatgtcaagcaaattccagccaagcgtatacaagagcacgaatgggcaatatttcgccgagcccgccggtgaccgaagcgactactactggatcaccgtatatttctccgaaaacatcgatcaccgtgggattccagattcagaaattatgctgtatgtaagggatatgattgaaaagggccgcttcactgtagacgatcagtcaatgcatggtctagggaaaaagtgtctctcgatccctatcaagcgggatccggatacccctctgcctaagtcatggacggcggatcctacacatcccgatctccttcttgctcagaatcttgcagggtattggaaggatcagatcgcgtttaagaaggttactctggatcaacggatgatttttgttgagactcgtcgtaagatagtgagtatagaagatatgttagatgtgggagttactctgatggatccctggcgaatttaaagcgttctttgtctgtgttttcgtgttgaggtccagttcttttgatttggatgtttcagcaatcaatgcaatgcgttttcctgctttgtttatacttgtcacttgatagctgccagaaatggagaaagaagataaaataagatagatctttctttctaattgttactgaaagccattattatgaatgatataatctcttttcataaaggcgaataaaatacccgaagggacagcaagaacaagaccaaacaagagtatacagataacattatacattctgaaagaacagggaggcattataactatgaaaggatttcattctctcattgtacgctgccagaatagccggatcgtccctcagaatataaacctcggcgtcctcgcctggagtaccatcacagtgcatttccacaaaaagagccctcattcactccaatcgccacaatgccttttctacaagcgagtgtgttccagtcaagccagctcgagcatggccaccaattccacttcaaggacccccacaacagccaaccaggttggctctgggggactgtgactcttccggataccatgggccttggaaccagtgacaaggagattatagtacatatatgtgagaccatcgcagcaggcttggttacttggagcgatagtgcgatgcacggcttgggcaaatactgcatctcgtttccgatcaagttggaaacacccaagcaggacttgaaaaggctgatgattcaggttgagtacgcggcactgtggtgggtgagtttcatccgcgcggagactgtttctattgacaagcacatgcttttccgggcccgtcagccgcccccggatcgtgaggatcaacttttggatgtgcctttccattgggataagcctgactacacggctctgaatccgtggtctgtagtcactgtgctacggtagatcgtggggattgattggtgaagatgactggggtatctgattgggcttggtaggttgatatttcgaatggaacaatgagtgagaagatatagtaacccaagtgaatgagtagtaataatagaatttgccgcaataacgccagtatgatacaactggaacctacagataggttaccaggtctctattgatgagactttagatccaccgtgactgtctcgcccttctctcacgctctttcattttctgcatgagggtatatccacatccggcaccagtcatatacccacctagatgggcagcgtgatccatcttggtcagtcgggagaggggccaagcgcggaataagaacgcgggagctaccaagctgaagacctcggtgccgatcaggcaggtaaggaagacccagccgtatgcccagatctgttcttggagcccttgaggaagaatccacatggtgagtttgtcactaggaggggtcagtataggtactatatagaataacagccagataaatggcgggagacatacttgaagtggaacatgcaccatgcggcgacgataccgctggttgcggcactggctccaagggatgtcatacccaggcggccgaggatgacactgcgtgtcaatgaaaagacagatcccatgatacccgaagcgaaatagatggccaaaaagtttccgcggccgatttcatcgtggactgtagagcagaaaaagttagaatccatattttctagtgcttctccttgtcacaatgcatacctctggtccccataagtcccaggaccatcatattagttccaagatgtctccatgtctgatgactgaaagcgcttccaatcatgccaagtgagctaggatagaagggaacaatcacgaagtaacggttgagcagtttccacgcgggaggtacatatttccatagcaaagtgactgctaagttagctgccacaatggcacccacagtagccacagcaggaggcacatccggcatgaggcgatcctttcgtgctgggaactcatatctctgagcaaaagtatagcaaagagcaagaaccacgagcgagaacagaagcggagcgagtagacgctgagcctgccagttcaaatatggttaacaactaaacaactccacagagtgaaccatccttacattggtgatattcatcgattcagggctctcgttggtagcggcaatatgatgcttctggacccaagcgagatacggcctttcgataggatccgcacggggacgagctaaacatatcagcaccaatacctcacttagactcgaatcttcgtatacataccctcagtgagcgcagcttcctggtactgctgcaaggaaaggttcttcccaaactcccgcttcaaccgttcgtgttcttctttttcgccatcgagccactcctgccttttccgttcctgttcagccagcaagcgcttctcgttcctttcgcgagcctctttcaaaatactcttgccgtaaggagaaccctcctcgccaagctcggcgtcataagaaccgctttgcggcttatacaaacctagcttttcagcgcggcgcatgagtttctcttccgccgcacgatcctcacgttcaatacgggcaaagatagcagcatcctcgtcgacggggtactcatcgcggagccattccaaagcagtatcaaactgctgcttggtgatcgagcgggcaatgtcaactggcaagtccgcatcgagcgtgccagtcagacggtggccgtgtaggacagccaagatacggtttcccagctttgcattgaacttgacggggccaaatatggccttgatctcggcatcagagaagggcttttggcgggggagaacctccgagggatccgatttggccttgggcttgggagatgcggcggacgtacgtttgaagcggcggggggtagagaccaagttgagtcgttggggagatattggggttggagttggtcgggacgggcgagagaatagttgggacagaaggttcggaattggtagcatggattggcgcgatgtactgtacatgcgccatggggcaatgcggagatcgcgactggcaggccggaatgttactggcagcacggaggtgcggagccctgggcatggagcccgccatacggcccagaccacattgctcatatcctgtgactagagcgagggctcagagaggaccatggaatagagggtgatggtggattgttcggggttctttttggcggcatcaatggaccgcacggctgcagagttgttccgagaccgcgattacaacaggtatagagcgaaaagatggagaaatgatagtgagttcttgaatatgctttgttttttaagatattactagtgtgaactatagtatcagatgttctacctaggtatcccatccctaatgcaccactaactagtcaaaatcaatcttaactgacatccatctctgatctataaaacgcacgtgatgataacagataaatgataataaacggccctggagatcatgcatcatgcattgatttcatctctctttcaccactcaccaaagaaacttcaaatgtcgacccaatccctccctatcactccgggcgcctttgccgaagcaattaaagagcttcccctcgcagtcctctacagcaaagtctccgagatcacaaactccatcgcacacctgaagcgatctaatgctgagattcgtgcatacatagcagaaagcaacgattcagaggaagacaagaaggacctggagtgtcatgccactgaaaatgaggccgtgatggtgtccatgaatgagcggatcatgttactgaagaccgaggtcgagaatcgtggacagccttggattgagcttgatgagcttaagaccgacaaggaacaggacactctggcagatgtaccagtgacaaatgggaatgtgactgagactggagctggagctggagctggagctggagctggagctgacggtgcaggagaggagtccaatgatgggggggatcaggatggggtccatctgtgactaattcggtgcgttagttatctgtgtagtcggcttctttaagctggtctggattttgctaatcttcaaaagcattgtcaccagtctgccagtggtactcggttctattatttgcgggcgctttactgcatttgcgtgtgggtcgaagatcggcttatggcaattggctatgtttcactaactagctagtagtgtccattcttcacagtgcatacgatgtgacgcctgaatcatggctaagagacggttatcccaagtacgtttccccaagccttcggaaccgtccgcgtcttctgtagccctatgcaatcgagtcaccaggtctagacaacatggaatacgtctagtgaattgttcacaaccccaagtgtcattatggaattatgatcagatgactttattgcaatgaaaatattaaaaacaagcaatgaccaactgatgctgaatgaagatatgcaagatcatcaagtagaataattcacagcgcatgctaaatcaaagccccggctatgtcatatcattgcaaattcgcccatttttttaaatggcaggagaaagcagaatactaacaaggtaatacagcgcggtccaacgccaggttagcggacatgtcatggtcgtcaaagtaaaaacaaaaaggtgcaactccagaccggtggagcttaagtagcggcctgctgggcccagtggccaccggtgagcgcctctgggggaacccgctgctgcttgatgaacagctcaattaagggctgcataggctccatctccttatcggacacaagcccatagtacttggagacagtcacgaagtgaacgaagcacatgttcaggacatcgtgcttgttaatgtgccaaaaggggttaagccaatgagcgtggtacaaatgggcgtagcagcggaacatctgcttcatgataccctggcagtccttgtaaaaggtttgtgggaagccactggacttgccgatccaatcatctgggttggcggggtcggagggagttgttgatgcgccattggcctctttaatggaagatgtttcaggaatgccatttactttttcggtagggaacataacaggatcatggatcttgctgacgatccatttctcgacgcggttgatgaacttcggcgcggaaattttggcggcgcggccatcaacaagccaggtgtaggtcagcctttgaaatcgtcagccccgtttgaaatttaccccgctatacttcacataccgtccagcggacattgttggacaagtgttctcattgcaaataggtagaccggtcacaccattcacctcctggataacctggagcatgccgtgaagtagacgatattgttcaacaactagagtagagacatattagcatccccgcttccacgttgagcttccatattgcttactctggtgagccagccactcgcccagctccacattcttcgggcaagcacagagggtcaagaagttgcccctcacattcagcggggcatacttctcctggaagaagtatttgggtccctcagggtcgttggcttgagtctccactgacagactactggaaagcgagggcgaatttgacatggtggcttgatgctggggagcagaggcctgtgctgggcttttggggggattgttgctcttgttgcttcctcctcggccaaatccttggcgactgtattcaaagatagagttagcgggcgatcgtggcgaggtacggcagtttgagaatgaagtgggaatatataagaggaagtgtagatgtgaatgacaggagaaggcgccagggaagatattagactttagggaatagaatgctcctttgtatttgtggcgcgccgggggtttcttcgtgcagtatgagggggtaaaggtagcagggagattgaacaacctattgcaacaagtccacgacagcacagcattacttacacgctctggaagaaggtcgccatcttgaaattgatctgcaatgcttcaaatcaagaaaataacaggggatgagggacgagacggtgagatgtccacacgttgaggatccccttttggtctgggccatctagacactagtcctgtttgggtccggggtcggaaaatatatagccccgtgcgtcaattgaattatgagagctccgtcgtaacgatagaacaattgtcaatacaggttgcttactgccagtataatattcaggagtgtcactagtcccttctttaccgtcactcacacttccacacatttatgactttgcaacaacgatagtttccatacaccatgtcctcctccgacgaggccgtccgacgccctagcaatggcaataagagccctgcgcacagcaatgccaatgattctggcgccgaccagatggatgaaggcgatgatctctttggatcggacggagagggtgaactcgatgacattgagtatgcgaaccacaccaaagcgaccagcgctagatactgatatattaccagaccccaccgcaacctggacgacgaacaacttgactccggtgatgatgagaatcgctatgatcggcgcgaagatccaatggaagatgtggcggaggagcagcaggaagtcaatgttgctgaccaggaccttgctcgggctccagtgccgttgaccaacgacggagaggtaggacgagctctaccttgaagctttgatattgatctaacttctggtaacagatctacacaatgcgtgtgccggatttcctctcaattgagggcgaagaattcaaccccgagacttacgtcccaccgccttatcagaccgctgctacctccctatgctggcgtaaagatcctgcggatgagtctcttttacaatccaatgcccgcatcattaaatgggaggatggctccattactcttcaactcgcctccgccccccttgagcaataccgcattgcatctaaacccctcgcacctctcactaaatccggcgactatgaccacaagctggattcccacgtttatctcgcagctggactagaaacagctcaagtcttccgattgacttcacatatcacccaaggtctgactattctcccgaccactttggagacggacgatgccgttcagcgactgcaagaacagttggccgctgctgctcgtggtagcaaacagaccgcagctggcactgcgccgcgctatgaaataacagaggatcccgagttggctggcagacgtgccgaaatgatggaaaaggaagctatcaaggccgagcgtcgtcgccagcagcttgctgatcgtgaggccgaccgcggtcgccgccatggcgctactcgtactggtcctagcggtcttagcgtcggtggtcttgaagatggcggcttgcttacgactcgtccacgtgccaagcctcgccgccaaaaccgccgcggcgagatttacactgatgacgaagaggattaccctcgtggtgctcgtaacaaagaagacgagtacgacgaggacgatggattcttggttggcagcgacgaggagcttgaggaagaagccgaagatgaagaagaggagctggaggatgaagacatggatgccgaaggcgaagatgacgtggagactgcacctgccaaagctgcccgtagcaagccagagcctcaaaccagagctggtacgcctcctgcccgaaagaagaaccgctacgttgtggatgacgaggacgacgagtgagtctgtagcgttctatttttctcctatactcttttcttttcgcgctttcgatgcagttttcttgttacatatccacatggtccggcgtcttctacatggacaggcattcgagggacaatggggctcatttcactctgatttgatgcctgtacaacaaaaattaatgaaatggtcaatgacatatcaagttagcttcgtaccagcgaagcaacgtagatttgtatcatctgatgccgaatggtatatacatatgaaataataactccacataatctcggacatattcgaagtgctctaattagccagatatttcatgcattatgagcccccgtgtgcgctttgttcctcgcagtgacaggctcaacgccctcgggatattctgaaggatcaaagttgaattttttgatcacatccctggcacttccaaccacacgaagacataaaaactccttttcactagaatcctcttgatcttgtgactgagccggctctggtatagacattgagttccactgtcggcttggatgttgcccaggctcatgccagcggcgttgccgattttcgatttccataatcatagacagcagatctggctgctgagaacagacaataatggcacctggctcaacgggaccaccaatgacagcgcgacgaacaacttggtggagccacgatttccaaacttgtgctgggtcagggctttggagtacctcagacacgtactgtggaggcgcggactgcatccccagttcaacagggtcggtttgcgcaacgcgaagccatgagtccgcgacaacggttaatagagttcctataaacatgatattttggaggcccgttgagaagatcttgggacaaacttgacagcggatcacgttccgtgctgttcgtgcagcaatatatagcgagcataaagtgtgggagttgactgggaaggaggaaatggatgtcatgtggctaagggataggtagaggtatgataaacacggacacccagacgctgtggagtcggaggaaactgaggtggcaggagatagcggcgtggaagggaaagctggagggttggggaatggcattggcatggccgtggcttcggagatggccgagaaatcaggccaaggagaagatgatgcgggaacaggaaggtttgactgttttggacggtctggcctacacatatggttgtggtcttcataacctgacaatagatttgcggactggcactgtggcaaattcatgttcgtaccaggccgccagaataactgcggacaaagatgatcggtgtctgggaaggagactgtgtttggactcatccctaatgaagattgttgcaagtcctctgggctgggccaaatttcagttccagatagccctgggaattcgaccccctcatcgtctgttctcgtccttttcttgggtggccggcccatctgtttttgtatggaatagttgcacgagagtgactgtttgatgcatcgcgaacagcctgctggttctccggagcatttgagcttccgttttcctgtcgaacagtaaactggtcagtgagggttatattacatcggcctgtgagacttactacactcgtcgcatgctgcatgtctttttggttctgacaaatcattcggggtaggcaaagaagcctctccctcatactcagtcgggagtgacatcttaaaaaatcgaagatcaacagagcccttcaataaaacattctaatgttgggctaggtcatagatagactcgataagatgggggcggtcatgtgggcggtgagcggcgaggcccgagaaattatcctaaaaaaaaaactatggatctaccgcaacaagacaacacccgctgaacggcatcatgaaccccaaggcggcttcaaaaaagcgcaaggctgtcactcgagatgtcgaggaggaagccggtgtcttttccggtgacgaattgagcaaaggcaacctcgatggagccttgtcggacaactctaaggatctttcggacaacgaagacgacgacagcgactcggaagtcgaacttgtcgacgatttcagcgagtcagaagatggagaagaggaattggacagtgatgagatcccctctgatacagaggacatcaagccagctgctggtgaacccaacttccgcattgtgaaggacgccaacggaaacgatcgttacctctgggatgaaattcacccggacgacaattctgaactctccgaggtggatgaaaatgctaacaccattggcgacattccactgaagttctacgacgaatatcctcacattggttatgacatcaatggaaagaagattatgcgtcctgctaagggcgaggccttggatgcgttgttggacagcattgaaatccctaagggctggactggcttgactgaccctaaaaccggcaagcctttgcagctcagccaagaggaattagagttgcttcgcaaggtgcagatgaacgaggttccctccgagggctacgacccatatgagcctttggtggaatggttcaccagcgaacaggagatcatgccactgagcgccgccccggagcctaagcgccgtttcgtaccatccaagcacgagcagaagcgtgtgatgaagctagtgaaggccattcgcgagggccgcattcttccttacaaggcaccagaggatagggaagacaaggaagaggaactcatcaactacgacctgtgggctgatgaagttgagcgacctgaccacgtcatgcacatcccggcgcccaaactccctccccctggttacgaggagagttaccacccgcctgctgagtacctgcccgataacaaggaacgcaaggaatgggagcagacagatcctgaggatcgcgagaaggatttccttcccaaggactttggctccctgcgcagagttcctggatacgacaacttcgtccaggagaagtttgagcgttgcttggatctttaccttgctccacgtgtgcgccgtagcaagctgaacatcgaccccgagagtctcttgcccaagctccccagcccggaggaactcaagcctttccccactgcttgtgccacagtctaccgcggccacaagggccgtgtgcgctctgtcaacgtcgacccaactggtatctggctggccactggtggcgacgacggtactgtccgtgtctgggagctcctgacaggtcgccagttgtggagcgtgaagctcagcgacgatgaggcgatcagcacggtccgctggcgtccgggcaaggacgccgttgtcctcgccgccactgcaggagacgatatcttcctcgccgtgcctccgatcgtcaaccccgaaatcgaaaaggccagtctggatctcctcgacgcaggctggggtttcgccgcttcccgaccggcccctagtgcctcagaggagggcaagaagaacacgcccccgacctggatccgtccctcgtccgctctcgtggacgctggtgtgtgtgtcgtaatccccctccgctacgtgcccaagacgatctcctggcaccgccgcggcgactactttgtgacagtctgctcgggcgcctcgacacccgcctctgtcgcaatctccattcacaccctcagcaagcacttgacacaattccccttccgacgccgcctaaagggtggtggtccccctcagaccgcccacttccacccgtcgaaaccgatcctgttcgtcgccaaccagcgctcgatccgcgcttacgatctctcgcgccagctcctcgtcaagatcctgcagcccggtgcacgctggatctcgtcattcgatatccacccgacctcttcgagtgcatccggcggcgacaacatcattatcggctcatacgatcgtcgtctgctttggcacgatctcgacctctctcagcggccctacaagaccctgcgctaccaccgcaaggctatccgtgccgtcaagttcagcagccgctacccactcttcgcagatgcttccgatgatggatccctgcagatcttccacggcagcgttactggagatatgctcagcaatgctactattgtgccgctcaaggttctcaagggtcacaaaattactggcgagctgggtgtcttggatatcgactggcacccgcgcgaggcgtggattgtcagtgctggtgccgatggaacgtgtcgcttgtggatgtaatcttgagatgccgttgcatgatgtctgacatttttctgggcgtttttctctatttattttttttgtgcataatcttccttttgtatagttatcttacaaaaaagttggtcctataaaaatttctacttagtatcatatcagaacagttaggataatccatcgtggctcagtagcggaagggatatagaattaatgatcatgttcagtcaaatagcaaatgttcaaggtatcttatgtccacaatcccaaggaagaaaaaatgggagaaaaaaagaaaaactctctagatctaaatatgtaaagatgtatatcccaagagaagtacatatacaaatcagcctcaaactcaaaccacaccaccactccaatccctcctgagcttctcatacttcctcaagtccgtaacactaggccgaacaaatgacttagcagcaacaaagtcaacgaacttgatactatcgcgacgcttgatagcagagtaaccagcacgacgcaacaaactgcccaaatcagcaccactgaagccctcacactcctcggcgagtttgcgcagatcctcactaaactcaatagacactttccggagaagagtctgcaagatctcgacacgctcgagtggcgtgggcaggttcacaaagagaagggtctcaagacgacccggacgcagcatagcaggatcaataatatcaggccgattagtcgcagcgatgacgtagataccctggcgactactgccgaggccatcaagctccgtgaggagtgtgttgacaacacgggcggaggcctcagagagcgtatcatcacggcgaggcacaagggcgtcgagctcatcgaagaaaataacacagggcactgaggagcgggcgcggacaaagacctggcgaacagcgcgctcagactcaccgacaaacttgttgagcagttcggggcccttgacactgatgaagttcgcgcgggattcattggcgacagcctttgcgaggagcgttttaccgcaaccgggtggtccccagaggaggacgcccgtcggcgcggtgatgccgactttggcgtagatatcggggtttttgattggctcgacgatggcggtgacaagctcctcgcggatgccgccaagggcaccgatgtcggcccaggttgtatcggggattgtggcgaagccctcgcgcttagaggagggttggatcttggggagagctgtgaagaagtccgcgttggagacgaggacgacttctgtttcatcgccgatgggggtttctttagcgtggataataaggcggcgaagttcgcggactcgcgggctgatatcgtcttcgccttcgatttccatctccatttcttcgccgctgttcgacttgaggatctggagataccgcttgatggcagctgagccggcggtcgagacgagatcgttgagatcggcgcccacgaagccgggggtgcgtttagctagcgtcttgaggtcgatatcgtctgccaaacgcattttgcgggtgagtgcgcgtaggatctgttctctgactggctctgagggcacggtcatgttgatttccttgtcgaaacgaccaccacgacgcagagcggcgtcgaggctgtctgggcggttggttgccgcgagtacgataacgggttttccatctgtcttgtcgagggcaatatcgtccatgcaggtcagtagctgcgcgacgattcgcttttccatctccctctgagcgctctcgcgcttcggcgtaatcgcatcgatctcgtcgatgaaaatgagacaaggagcaagacgcttggcctcttcaaagtactcgcgcagggctttctcggactctcccgacattcctgatacaaccgaaggcgcagagattgagatgaagggcacacccagttccgctgcgaaagcgttcgcaatcaacgtcttaccgcaacctggcggaccatgtagcaatactccgcgcgggggctgcacgtttgatgatagatagacctgcggccgggtcatgggtagaataatcaagtccccaagttcctgaacaacatcatccaatccacccaaatcggcgagactgacatgtgttggtggcgaacgatctgcaggctcagctttgcgtcgcttggacacagattctccgccatgcgttcttctcttggaggagctgggtgccggggtgctagcggcttcggtctttttggccttcgttgttgcccacgagccgacgacgctttggttcattccattgggttcctgatatagcaattccaatcagattttccgtctgattcgagtaaaatatgcgcggtgcatcacttaccgtagcagcaggctcctcgagtccctcaaagtccccctccacggaatcctcatcatcttcacccatatcagctttgataacctccaagactcgctcaagactgtcctcaatgagtctcttcggtttgcgattcaagcttgagtttgatttcttaattgtgtcataaatcgctgggaccgatagtcggatgcgcccagtctcggactggtcgtcgataatcttgcgcacgatctggtagacctgtttttttttttgggtgagtcaaagccacaaagattcattgtatacacacctcacggtccaggccctgactgagggtcggcctgcctcccttcctagcagccatgattcgatatggttgttatgcaaaaaaaaaggccgcgggcccgaaatttcggagattggaattttgaaagatcggttgaaaattacacgtaattacgcgcccgttacataacgtcattcatgtctaggcccgcatctactccgtacatatgggggttctcccttctcttcatcaacatgggaaactcgagtagttcgcagaagatatctgcccaggatcggtgagtgcaacctgctttactttatacatacaatatcaacaacctattctcaatcccgcctcccagggcgttctattattgccctcacgagacccctcatccccacccagcatgcccattcagggaacgcaatagtatgattttagctaaccaaacactccgcggtaactgtagggcaattctcgacctcaagaatcaacgcgacagactgcaacaatatcagcgacgaataaccgtcctcacagaccgcgaaacggaaatcgccaaggaatgtctcgcgcgcaatgatcggcggcgagcactactcgcccttcgccgcaagaaataccaggagtcgctccttgcgaagacagatggtcaactcgcgcagctggagcagttaactgggcaggtggagtttgcgctagtacagaaggacgtgttgttcggattgcaacaggggacgaaggtgctgcagactatcaacaaggagatgggtggcattgaaggtgttgagagattgatgggggagactgaggaggcgagagcttatcaggaggtatgtgcctcgttgtctcttgttcttgttcggttttgctgacggttgtcataggaggtgagtcagatgctggccggtcatttgacgaatcaagatgaggatgaggtcgaggatgagctggaggctctgcagcgggaactttctggtcctgaaatcctgcctgatgatgtcgtactgccgagtccgcctactgctgatctgcccgttgaagagccagtgccagagtcgactcagagaagcaaggctaaggctgagactcggacagctttgcctgcttagtggggagatatgttggatactcgttgcacagcatcaagcattgcattaaattgatccatagcattttttttggcgtttcagcttctttgtttttgttgcctacattgctggtagagttcatgtgttctaaggcgttactggttggctttattgctcgttgtcatactcgtggtctatatattatgacaccatcagtccgaggtttacaaatgatactcaatatatgaacccaattcactggaatgagaatcacataacatcaatgaaatctatgtagaagtacatagtagtagaatggtattgtcgttaatcatgacggacccaagacacaccaggtcatacttccccctcgaacgaagcctatctattgcccaggcataatactgccaccgacaccactaacaccaggaatagagacatgatcctgggggttcgccgcagcctcataaaggaaattaatcggctcccgggttaacttcatgaactgccccttgaagcctacatacccaaccttagtcacatcctcctcgccatcactccaattatcctcaaagaagagcgtaacaaaggtagtcgcattccaatgagcgcggttcaagggtaattcaaagacatcggtgccgggtacaggctgcgggacctcaattgtttgagtcgggtgcaactccgatgcggttgagaaatccatatcgtcgcggttcttgaacagctttattgtctttggggcggagcttgtaggcgctgtgtacaaaaggagggagtggacgttgacctggccgttgaagctatgttatagaagctcggattagtttggggttggcgataacggtgaggggtcaaattagtgggggtgtgtttaggattttcgtgacgcgtcgcaaggggttgaacaaccactataaaatgtaggatagatgtgtgaaatgagcgagactcacgggatggtcatgagcagttgttcgtcggcatcactttcgagctcgggcttgtcgtttagtcgctcggcccaagttttctggacgatggctgtaccagagtttggggttgtctctgtcaagatttaaaaaatcgtcagcaatagttgcctggtgatcacaatggtcatgagtaccattcagggttgtgatcaggtcgaagttgatctgggagtaaaggagggattggatggctggagtgatatcgttggtatggtcgtgatcttcaccgtggcagtggccatcgtggtcatgatggtgccctgacattgcaagatattggtatagatttgatgttgtacaagatgtggataaggcaaagatggatttggatatttgaaggtgaaatgttttggaagctctccactcccgtgacgtcgttttatcccgagggatcacattgttcgaagtgaattgatatttctatgtattaatttacaatgaggtagtatatctgaatatctcactgtacagtacaatggcacaaattgcctctgtcgcttttactgccttggtttccgtcgatctataaaatgcaaccaacacactatatctcaattccacagccccctcaaacgcctgggtattattgtacatgtccctcctctctagctgaattcaaggtgctgttattgcctgactcggtaataatccggagcatactctagcaggtaactcttctcgatcttagtgacatcgcggatgtaagttttgtcacccgtttgcatgatttcgtggaatatgacccagtcggcttttcggttctatattcactttagtaaacccaacatgtactttcccacatgatctatgggtactcacaaacatcaacgaggtggggtgagcatgaagagtcagaccaccgctgacagtcttaaaggttccatctggttgcatcttcgccgcgtgagcaaagtagccagtcgtaagacaccgccgaatctgctccggctgcttgctcaaatcggctgtgccttgacgggatgaaagtgtctcatcgacttgaatgccaaagcgttctaggtaccgtttcaactggcctcggatgctcactgcgcgaagcagtgcccggtaattcaggaggttgtcgcgacaccattttgagtctttcttccctttggtgacaaaggcttggtacacgttgaggtacgtcaaatgatcgccctcttcaacggcgaactttcgccggtgactctcggcagatcttttgtctccagcatgttgaacccacacggtcccctgtaggttgaccatggccgcaattgtaaggatttcacttaaacaattgaaagatggtgcggtgagaagaactttggccatcataggatccagggcaatttctgccatccgtactccaagaggtttcgtgagtttggcatagtcgtcaatcgcaccgagagaggacaagagctcaagtgcacgaataataagttctgccggcggaggggtcaaaaagtcgaaccggacaatattgtcaatgcccagtgctttaagctgcataatgaccggtgcgagatttgatcgctgaatttcaggtacggttgcctccggcatctgctcaaacgcttgttgcgtgtacagacggaaacatttccctggtttcgttcttccagcgcggccagctcgttgggtggcggatgctttggatattggcactgcagtcagtgtatcaataccagtattggggttgtatgccctgagtttggcaaagccagaatcaatcacatatacaatcccatcgattgtgaccgaggcctcggcaatgttggtggagacaatgacttttcgggtgttttctggagtcggctcgaagacgtacatttgctgttccgttgtaagtccagcatagagtggcagtggaagcagagatggggccttaggatggagagtcgccgctctttcggatatcaactgaattgctgtgtcgatctcttcccggccagtcaaaaagagaagtacatcgccttctggttcttgggtatggatatcaaagacggtcttgactgctcgttctatgtaatcttctgccggagactcaaggaacagcatatcaactggatacattcgtccttccagactgatgatccgaccaatgcttccacccaaatccgccggttctgcctcgggccggtactcgtcgcccgcgaagaaacgaagaaagtcctctgcttggagggttgcactactaacaataatgcgaagttcagggcgcttcttgcggatcttcttcagagttccaagcagcacatcggtactgagagatctttcatgtgcctcatcaaccatgattactgaataccgcgaaagcaggggatcaaccagggcttctctgagaagcatcccatctgtcaagaatttgattcttgttgcaggagatgtcaaatcttcaaatcggatggagtagcccacctcttcgccgactttgcatcgcatctcttcggctacccgcgttgcaactgttgtagcagccacccgtcggggctagaacagagttagtcggtacttattccaaatatgatttgatcagtgctcacctgtgtaacagcaatgatcttcccatcctcacaccatcctgcttggtctaaatattgcggaagctgagttgttttcccactacctgtttggcccaccacaatagtgacggggtatttctcaaccaggtagagcaggttctttttgtgacgtgcgataggtaataaagcagccggtttatacagagctggaatgaaagaggtcgagagctcctgttctgaagccattttagaccgaattttagctgagaacgaactcttctggatttgagcccggttgttaaaagaaaccgaattgggactgggccattctgaggtgtcaagcgctttgcagattggcaacttggagatcgtcggagttctcgcagaaacatccagggcgatctgtataaagcagcccgctatcacgtgcgccccacgtcacttgaagcttccccgatatgttctgctctcagacattctcaggcaacacagtttttgtgaatttcccttcagtcactttcaatactctggcaggtcctgaatatacctcaagatgtcagaggaggaaaagatggtatgtttcaaccgggtatcatttcttatcgcatgaggctcacgttcatacccagaacacttccagcagaccctcagctgcccttggttcctctaacagcccccgagccgagtcaccgaccaccgcgcgcccgatggactttgacgacgagccccaggagaacgggattattacgtccgaccctatcgctactcagccagctgccgccgaggcagccccgccaaagccgccccggcccctgaacccgagagaacagtcggagaacacccttagggaggcatttccaagcatagagcctggcgtcattaaagcggtcctgaccgcaagcaattggaatgtcgagccggcgttcaatgccctcctgggttcgtggggaatctactaagaaatgagtatgagctgaccacgacctcggcttgcaggtatgaccgaccccaaggctcaagaagagatggcacccccgccaaagccgccgcgcccaagccaacagagcactgctgcacagcgacaactggaagccgatgagatgtatgcacgtcaactatctgagcattacaatgcggcaggacgtcgcgcaccacccccgggctgggagagtgatccccgataccagcgacctagaggaagcgaggagtcagaggagagagaatacagcttttttgatggtacgggctatagtggcttgccgaatgggctcgtgctaactggacgtttacagatgatctacctgtgattcgcgagaacctccgcaagggcttcctggagacgcagagtaaggttaactcgtgggtaacaaacctgaagaagcgtattgatggagaggacctggatgaggagcctagccataatcaaagagagactcctgttcatgcccggccccgacgtagtggtgatatgggccgtcgcagtggagatcgtgagcgttacgacgcggaccccaaggttctcggggatgatttctctgctcttgagttaagggatggagaaggtagataacgatctcaagtgtggcatcattgggtcttgctaactgtgcacagctcccccacctcgcccccctcgtccgggccgccccaactctaaaccatccgcatctccttctccagataggcgtaaggtgtctttccaggatggaccgcccgtcgagatcgacaacctttacgatgcttccacgccatccaagcgtctcagctcaacaggcaacaaggcgagcaaatggcagccactgtccaccgttgagccttctcccgtcgcggaaaatgacccattcagccttggcgacagcgatgacgagaaggaaactaagatcaaggagcataccacgggctcggagggcgatcagcccaagcacgtcactgtcgagtcagtctccgacgaagtgggttccacggaccaggagaccaagggcgcgagcaagcccgacgagtcaaaataatcgcgaatgtctggaatttgaatatccccactgttatctgcgcgaagcacttcttgcctttcctcccagcccgtgaccatatttatttcccctgtcgttttactctgccaacttgctctgctatgcgctacccacctccctgattttacgatacctagtagaggtagcccaagacgtttttcaaccttcgaatacctgcataaacccaagccaaattgaatctgtatttgtaccggaaagaaacaaaacaaaagggtatatctccgactggcccgtatagtagcctcaacgccaaaaccaaaacaaaccaacaggcctcgttcaattcactgataggcatcaggcaactcccgaggtctcttacacccacgccgactccccaaaactattactccatggcgggagcattacccacgcgctttgaacctgtctccttgcgcagatccttgatgacagtctgtaaagtagagtcagctgaaagatacctccaaaagccgagtaatgcgcgtagagtgctgttattggtctcgggggaaacgcgtaccgccaaagcatcggggttgaccccgttctcaatgagagacacacaaagtgacagctctgtccggtccaggttggtattctattcaaaatatcagttttatggttacagctttatcttctttttgtaaagaagagagaatgacgacatggattaggcagtcttgaattctgaatcctctctagtttagtccgggataagcacgcaccagcaagtcggagatctcctgaagaatatcgatgacttctctggcagcttggcgcttgtcatcagcctgatcttgagtttttggcggcatattttgttttgaaattgaaggtgggggttgttgaagtgtaaggcggttgaatctgtgtggttggagttgagttgattgtgtgggactctgctgcgggtcaaggcaaatcatcggcgcatacggagtatattgcatggagtactccatacattaacgtgatatttgatattttgataattatctgtattctctaggatacaacattttagttaatctcttaaaatctatgagatattgcgaacactaatattagtagggcattctctattcaattgtcaatagatggcaatctgtacactctcaatcctcgcgataaatgcattgtccatagatgggagaattggactatacgcggccaccttgataactaccactaagatctagtgatcttcccattcgcaccgaaccctaatcacaaccatccccgcccttcttactacccgtagacgttaggactcgggtgagacagaaacagatccaatagggagattgaagaaaatctgatattatggctatttatgtcaaacgaactgtgcaatagagtacctattaggctgatccggctaatcctagggccagtgaatacttttgttgtttttcggcatccggaagttaatgaatacctacatgtatgtaggtttacacccttgtaggggacttttgtttgctatgggttgtgtatagggtttaccatatgtaggtagtagacattctttcacatccttttcgtttccctgtttctctgtatgccttttacatacatttttcttatatttacataatttgagactactttgccttactgtgacagcctaactccatgcaatgggccattatgaagatatatttgatccctaaatagcgttaccctacagaaatgtcctggcatcgccaatatgcctctcgtgagcatgtagctaatgtaggtttgttttgggcatgtctctaggaagaggtgattggagatatcttgacaacattgagatcaacttttaaaactgtatcaaagtaatagattgaatggaggtcaggacggagagctgcatggtcgagaggttgaggtatacatgtgaagcgttacatcctaggacctaagctgagcacacggcaaaccccctagaaggtcatacttcgcctacagtagctgttctttcactagagagaggatttatataacaagcttggaacattctaagaactaggtcatgaaaaacgaggatagagcctcaggccctcgtactacatatgtactatgtagcttgtatgttgtaagcttcaagagaaagctgcatataaataaccattcaatagaagataagatgaaccaaaggtaaatacaaatatcatcaggtgattctatcttcggttttgtatctggagatagctgatatagaaacgtggaccgggaaaaaaaggaaatgcgacaacattggtacgaggcgaacggcgatgcgtactaaatggttaaggtaaatgcgttcagagaacgatgtaatcaaccaaattaaaagtcaagctgtacacaccgtacttcagctcttctcttactcacatttcccacgaacccatctgcagccagccctatcgggttgaggccaaacatcatgcctttcagcgtgactgcattcaatagggacacgggattcgtcatcgtaccatcgacagacccaacagcctggcaacaattccgacaccgaccctgtcttttcctcgcccgcaagctctctgcctggcgaccagccaaccgccccgacctgcctgaaaaacctatcactgtagtctgtattgcaaacgcccacagacagcgaccagtgataccgcatggtgacattctgatctatgctggtgggttggcagcagatggatcgctcaccgaactccaagccacgctggactggctacgatctcagcctcactacactaaaatcgttgtggcgggcagatctgaccggtatcttaacgtattcaagaaggggggtgaccgctggagatatggatatcacaatgcggcacaatggagcgacatcatctatctggaacacgagcatgtcacagtgactgctcagaatggacgccaactccagatttttggaagcccatactcaccaaagactgttccgttcccggccttccagtaccctgagactgataatatttgggaccaaatccctggcagcgtggacattctcatcactcacacaccaccatacacgcaccgcgactctctccaaggatgctggcatttgttggagcggctttggagggatcctccccgactgcatgtttttggctgttctcttgagaattatggctctgaacttttgcattatgatgctcttcaggaggccatggagcgcattgaggctgccggtgggggctttgtcaatcttctgaaggtgctcaaagcgcttgtacagtcctttttccgtcctagcatcaaagctaagactgcgctcgtgaacgcatgcattgaagggggattgtggcatcccggacgccaaccaatcacggttgttatttgacttgggctggaaattggttgcctatgcgcctaggcactttgcgaggatgaggtgactcgatgcgtgatttaccaatgaatgaaccacctgctttaactgtacatgcctagacgcgtagatgaaattgagatattgtcgactcgtagttgtttatagaccaaggggattctcattggtcgaaactcaccggtggggaccacgacacttttcactacactcgatgtttgaactaacttcctacttttacacggcataaactgtcacagttacagtgtcaaatatctggaacaggcgtgctaaaactagtcagccgtggtctggaatggcacctcgatccgaaacgggaggaatgtccggcctcaccatctcggacattcattccttaaagaggaacgaggcactggagattcttgcccaaatttcacgcgtcgagaaaaggaccttccccaccaatgaggcatttccattcggcgaggatttgtggagaaagaagcctaacacgcgagttctgtacgcgattcgagccaagggattgcaatctgatctaattgcctatgcggtctatgtccgacagaagggcgttgcgctcttgcacaaagtctgtgtgacagagcctaaccgccgtcaaggtgtcggccaggaggtgctgtcctacattcagcagcgcctgcgaaaggagggctgccagtatattcaactctgggtggaccaggccagggagcctgcacgcgccttgtatctccgaattggattcgaggagcgtgaggtcatccctgattactatgcccctggacgaacaggtatcaaaatggtcctggacttagaagcgtgatggttgagccactgccgtcaatgctgcactccacgggcctttttccccccactaaaaatgtgccttgccttatcggtccctttgtaatacatcctagggacaataagtcatggtggttggacgcgtctatgctccttggctgctgcaggagccacctatcgctaccccttgcatagacacgggcatcttcgaaacgtgagattatagcgatcgggcctgtgtccattctccgctatcattctgctacatacctccgtgatatctaacatatccaggtatggcttttttcaaagggcacgccttgaatgtctccctggtccctttggtgcgagagggaccgcgatccttttctggaagatcatgcgtgatactcattcatcttcgtcctgaatctctttctttcaatcttgactactttcactatctttcgccgtgagactgggagcatcattggtgattggcgagctagctgtgtactttccagctatatacagttccagtgtgctcgcgttctctcaatcgaccatggcgttctttctcaccatcgtgctggctttcctgtccgtcgccagtgcagcatcactgtctgccaattatcctatcaacgcgcaattgccacctgttgcccgagtttcacagcctttccgatttgaattcgcccaaagtactttctccaacagtgacgcggacactaaatactctctattaaacgcaccatcatggcttgaagtggacagcaccagtctcaccctatccggtacaccgcactcaggcgacagtggcgcgatcactttcaagcttgtggcatcgaatggatcggaaaaagacagcatggacgttactctaatcgtgacagcagaccagggaccgacggtgaacaaaccgcttgtacctcagctgcagaagttgggaccggtctcataccctgccacgctgttcattcaccccggtattccattctcgattgagttcgatccggataccttcaacaacacgcatccctccacgatctactacgggacatcgccaaacaacgccccgctaccttcctgggtcaactttgacccggcagccctgaaatttgttggaaatagccctgcttttccaggcgcggggcctcaaacgtttaccttccagctgatcgcatcagatgtaactggatacagtgcggccaagatgacttttgaactatcgatcggtccccatattctgacattcaacgagactgtccagacttttaaccttacgaggggagaggagttcaacagtcctaatttcactagtcttctctctatggatggttcgccaacttctatcaaaaagctggcaaaagtcgatgctgaactgccgaattggttgaaactggataaggacaatatatcgctgagcgggacgccaccgaataatgctgtgaaccagaatattactattgccgttacagactcttttcaggatcaagcgcagttgatggttcgcctagaattcctcaagctgttcctcgatactgtcgatggctgcgaggccgcgattggccaggagttcaagtttgtgttcaaccagtctattgtcactgatgactctgtacaattggaggtcgatttggacaacgatctcacatggcttacttacttctcggacaacaagactctttacggacacgttccggatgacatggatcctaagaagtataccatccctcttactgcatatcaaggatcgaccaaagacacaatggacttcattctcgatgtgctgagagcctcggacacacactcgaatcccacagatccgtttaccaattctaacagccccaaccacaagaaggctggcatcatagccatctcagttgtggttccattcgtggtgattctgagtctgctgattctcttctgctgctggcgtagtcgcaagagctcagccacggtcgaagaaggtccgtccgacagcaagattcctccgccacgacctgttaggccagatgttcctaattgtcagccatccatggcggaaagaccttctcgtgatgacaattccgaagattggatgagtcctatctccccatcgtcgattcccaagctcgaacttgggcccgcgtggaacgtgtcatcatttgataaacgggagcacccagttaactttactatccctgagcccgttgttccccctcgctctcctgctcgcaactctcccactcgcaactctcccattcgcgggggctttgtcccactacgagaccccatcacccaagaggacaacccagtccaaactgtctcaccttccaggaagcaaaacaatcgcctctcatacaccaacagccctgtgcgtcgtagaaccaccaaccggtcccgacgagagccattgaagccgatccaagcgcgagccgtgaagcgagaatctctccaatcatccaagtccaagagatactcaaagcgctcaagcggtatttcctccattgcctctggactacctgtacgattcagcggagccggccatggtgccggcggcttcggacctcctggacacggcgtggtgcacgcatcgtggcaaaacgcacgagcatcaatgctgagcgatgagactagcctaacaaatatggcgccgattttctcgcgtccgccagcagcaggacgcatgcgccacagcatggcatccagcctccacgacaactacaagcgtatgaccctacgcactgttgagcccgacgactccatcctttccgaagccgactccctcgaagcctttgtccacagccgagccaagcaccgcaactcctccaaccctctcttctccgcgcaaataagccggcgcacttcctcgggcatgcgcgcactcgaccgaaaccgcagcatgcggagtcgtgccgacaccgtctccgtgtcaaccttcagcgacgaattccgccaatccatccaagaacgtcccttatcgactgcgatgtccgcctctgactacggtgacgacagcaacaacaacagccgcttctctcaatatcagaactcccaatttcagaaccagcccggtctgtttccccttgctgagggaagcgtatatggccagagccagttgagtctcgcacaagactaccgcggtgctatctccccgctgccgcggttctggagcgagaatagtctgggcagtgctcggaaattggagggccagggcacctctcagcctcagaaagtgaatgatgaaaatgctatgccgcccagctcgtctatgatctcggatttggacgaacatctgtcccgcaaggtcagccctagcaaggaccctgatcatccgtggtggctgtcgtcgcctcttgagcccccgcggccgccgaagagtgctgataatcggggtcttcctgtagccagcagtggagagctggcatttgtttgatctctgacttcttcgcctatattttccttgtttgatgtctctctatctctctatttgtctttcttttctttctattatcgtttctggcgttatccggcattgcgagcatgatatccattggcttttctatggttgattcgttggtattttggtattttagtgaagtctctatgctagtaaatctagttctagagccaatagtaatatctctgcttcattgtttgatcgttatcgtagtgggccactggggcttttaggatacaccgcttggctttctaacatggaataatactgtgcgatgcgatacacaagtagtagcatgacttatgagcgggataagagcaccaaagaggaatattaatccctacatataagaactataagaatagtgtagattttgaaattttcgaatatggcgtgactgtacggtgactccatggcccctatttatcgtacatggagattctcttcaggctcaatgagatacagaatacaatatgttagatcctacgtagtcttatgtatgacttctttataacaaatatctctgaactcctaaacttcctccaacattcccaagagaacaggccagacaccacctcacgtgactctatagaggcacggcgtaacaaaagcggtaaacgcaataccaggaaatctctgcgagggtcttgtctggactcggacttctctctcctagcttccttgaaacttgtctttctaatcctcatctgcgaaaaatccctgttcttttccaaaaacatcccaaggcaagaaatcctatcgtcatccgtcgttccccacttatcgcgggacccagacgcgcgctgaaagccctgcgccctcatctgaccctttccctacagcacatctcctagcattttccacacttcgatccggaaacctcgaatcccccaccttccccgaattattcaatctttgccaatatgggtcaaaccctatcggagccggtggtcgaaaaggtgagtcgatatttcgcttttttgattcacaccccacactggcccattgtgaccctccaatgtcctttcttatggcgtcgaaacactcccctttcttggcttctgttatacctctgaaccagggggttatggaccgagtccctctcagttctttccgttgaacaaatagtccgtgctgtcgctcggaggaatcttcctcgggttgccatgcggggtcttgggtagttcagctgagtagtggggggtggttcgagcagcaacgaactggcatcgcaatcctaccaggcagccttgcatatgttgtggaaaagcatcgagtgtaactaacttgttatttttcgcttgttacagacctcgtccgaaggcggggatgactcctgtgtgtatggtgtgtcggccatgcagggctggcgaatcagcatggaggacgcccacgctacaattctcgacctccaggcaaagtataccggcaccaacgaaaaaccgaccgatccggaacaccgtctcgccttctttggtgtgtacgatggccacggtggagacaaggtcgcattattcaccggcgagaacctgcacaagatcgtctctcgacaggatgctttcgccaagggcgatattgagcaagccatgaaggatggtttccttgcgactgatagggctattttagaaggtttgtgcgatgttgtcgttgccgaggtacttcgtgctggatcgctgacttgaacccagacccccgttatgaggaggaagtgtctggctgcactgcttccacggccattatctcacagaagaagatctgggtggtatgttatgaccttgaaaaaaaagcccctatatccgattaaaggggtaaactgaccggtcaaaggccaacgctggtgattcacgatccgtcttgggtgtcaagggacgtgcaaagccactctcattcgaccacaagcctcagaacgagggtaagtgcatggaatcatacaagccgctacatgaaacattatgagggtctgacaaataattcaaacaggcgagaaggctcgtatcaccgctgctggcggcttcgtcgacttcggtcgtgtcaatggcaaccttgccctgtcccgtgctatcggtgactttgaattcaagaagagccctgagctctctcccgaacaacagattgtcactgcataccccgatgtgaccgttcatgagctgacgaatgatgatgagttcctggtgattgcctgtgatggtatgctttctattactccctctcgctattatcattgctaaacaatctacaggtatctgggactgccagtcttctcaggctgtggttgagtttgtccgcagaggcattgctgctaagcagccccttgcccatatctctgaaaacatgatggacaactgccttgcctccaacagtgagaccggtggtgttggctgcgacaacatgaccatgatcgtgatcggactcctacaaggaaagaccaaggaggagtggtataaccagattgcagagcgggttgcgaacggggatggtccttgtgctccgcccgagtacggcaagtctcccgaggaacccgaaagcatccccacttcttcgtgctgacgggcagttcgtgcagccgagttccgcggccccggaatccggaaccagtttgaggataacccggatgaatatgacctggagatggagcgttcgcgtggattaggtgtccgttcgggccgcatcatcctcttgggagatggcactgagctctcttcggaccagaacgatggcgaactttttgaccagaccgaggaagaccaggaccgtaccaaccaggtgcagcacgaatcaagcacccggaacgaccgccaggccactcctggtccccaggggaaacaggagaatgtcagcgggacctctgctcaaatatccgaatccccggcttccactgacgccgagaaagagaagtccgcatcgtaggctatgaacttatgaaccgtccatcgattggttctccctgttttggtttcaacctggttttattttccctgcccacagtcaacgacccttccccttgattccacgatctatgccttgttttcctccccttttctttgttttgcaattagttatcgtcgggctccagtcccgagcctgttacaccctttttttaactccttcgacttgaaatggataattgtcagagacgggacatgcggcaaagagacacagacggaattgaatgagatgaaagacaagagctttgaatttccatggaggtcgatgttgaaagagagagcccttcgccgggagctaaatgggcctcatgaatacgtttcttactttatgccatcaccacaacgagttaccgcagaaaatgcccgctattgacgagccatttacctacaattcctatccgctttttttccggggtatttttcttccccctcctaattcccggtctattccctacctacggtcattgatttacctatacgagaatgagtactaggggcgcaagctggtagagctgggtattgattgagattttgtcaggagcaatggacaatgacaacgatcatttacataccctttggcgtatatccgatgcattgcgcattttctttgtaccttggtagatgtttcattgttctattctggcaacggcgagtcaggtatattgacgtaggccaagccaggatgggaaactcctaccatcaagtcttaccaattgcgtatttgagtctggtagcaatgaagcacaacagtactccgtaaaaaagagtacattcaacggtaaggcgatgtatgacgtccacgatgtccacgataacccctgtaacccacacgtggtcggtgtaacccagtcctgccaagcctttatttgcaatctcccggccgtatttgcaattctcggtattgtaaaattcaaccccgtacactctacatcctgagaccgtggcttatgacagtggagttcggcccccactctttccccaaacagaaaattaccagtgtcccctaaaaccgggttgccgtcattcagggttctacatcaattctctccctaattctctcggttccccatcctttcattcatttccctcggaagacatctctcattcattcttcagggccaaatcatcatgtcgccttctacttctcccgccggcaagcgcaagcgcagcgcctcccaccttcccgcgcccgtttccaagaacgtcacagctgacctccagtcgtcgtcacgcgacgcgtctaacgaagaagggggcaaggactcaacagggcccgccaatgccaacccccacaacgccaatggtacccgccacccttctaagcgggcccgcaaggctgccgccgccggtgctgcaagccacaccgaggtgaacggggtcaagccggccgtcaacaaggaagaccccggcgagccatctgcgactaccgccagcaatgagaaggaagatgggcctcggtcgcgccccggtttacatatcgatttgcccgaagatgatgagcctgttacagaggagcagatggcgcccccggtctttggacgcctgcaggatcccgtgggttatcatactaacccaccaccaacgggtcgctcagtacgcgtttatgcggacggtgtcttcgatttgttccatcttgggtaagtgatcacacgagcggatcaggttttggtttcagcccccaatttcttcgggctgtgggcttgctcaattgggtaatagttgctgactatcactttacagccacatgagacaactcgagcaggctaagaaggctttccccgatacttatctgattgtcggtgtgactggcgatgaggagacgcacctgcgcaagggtctgacggtgctcagcggcgccgagcgcgcggagactatccgtcactgcaagtgggtcgacgaggtcatcccctgctgtccgtgggttgtgacgccggagttcctgtccgagcaccagatcgactacgttgcccatgacgacctgccctacgaggccgctgagggtgatgacatctacggtccgatcaaggaacagggcaagttcctggtgacccagcgtacagagggtgtcagtaccaccggtatcatcacacggtatgtttcacctcccacatcaaatccaacggactacagctgacattattacctacagggttgtccgcgactacgaccaatacatctcccgtcaattcaagcgtggcgcctctcgccaagaattgaacgtatcctggttgaagaagaacgagctcgagatcaagcgccatgtcgtcgagttgcgtgataacatccgcaacaactggaccatgactggccaggagctcggccgtgaattgcgccagatctggcagaacagccgtcctaacagccccgcgcccagcgcccgcaacagcatggactggggaatgcgtggacccctcaccagcccgacaggcggcagcaagtcgcacctgtcgcgtgtgggtgcggaacacaaccgcgcagatagccccatgggctcacgccgcaatgaggatttcgctaccgggtacagtctcggattgatcggaggcgtgcgtgcttgggtaggttacatcccacaatcgctggatatgcagctcagctttatctagtttaacttgtactaatgttcctcatacagatggcccgcagtcgtcaatctctccaggaaccccctagtgggatgcacagtcccactgacgaagaactcgagtccgagcataacaatggctatgacgaggaggtgcgtggccgtgccggtcacgtctctgctcagtagatgacttggctgggtgcctttgatgccgtatgtcccgagaagctacacattgggtggtaattatatacctgccattccagtccctatagccgcaattccccccttttccctgccccaccacactttcctcctactcttttgcatatgtatccatcttttcatcttgcattcggttcgtgtcctatacctttacaaattgtcccgtaactggcggtttctcctatgtcgggcgcttggtgtctttttttttcttcttcgtgaatagactgtatgccggccttggcttgttcaagttcgatgcagttcttttctgatttgttttcttacttgtcttgatttttgctttggttgtggttcggtggtttcaacgctcctccttccccttaatactctcccaatgaactttttcttgtttgatgtctttgtatatggccttgatttggtggtgatgattggtgactcctttcctctgatcatgctctgaccatgatctttgatgttggtatatccttcaaggccattccttatcacctgtttgttctagtttgtttataaaagctggaattgatggacagctgatcgggtatggtacatcacctcgccttgatcgtgtccggatatgaactgcacatagattgagatagctttgtttgatgtttcagtttccaattgcgtggccaattgaaactttgcaggttactagatctgatagatgttgtgtcagtatagaatgtatgtcctgtacgactatatccgtgagcctgctagccctgatctacgtatcgtctcttctggggcattgccacctataggtcggataagttatccgtttacctagaccctgcatatggattgccagacttgaaaagaaaaggaaacctgtcatccacctggtttgtttggtagatgtatagacgaagtacggattttgatatgttgcatgccatatgataaatgccctggatactatctcagagagcacgtacaaggaaatctcgacagttcctcgacacacctaaagcggctagtggatgcgtgccactagcgaaacatagcgtgtgggtactaggtagcccttttcaagacaaaaatgcggcagtaacaatggatcagaggggccatgctccaccttggagaagctctagagtattcggtccactcagactacttgttcttagactgccaagtcgtctatatgtactccgtagacttcgggaattctgcagatcccgaaattagtgttaaaatgccctgtcaattactgaggttcgatgacaccgagccgcgacagagtcagaaaatcactttgacattcataaacagagtgtccgggcgaaaactcgccaatcaagagcaatatctagagcggctccagtaggaattccctctggtgaacgtgcaatccattgattttgccgcaattccatacaaagatcaattaaagatcattcaagaatcagatatactggcaggtgtccatggagctggtctcacacatggcatcttcctgccttcaggatcggccatggttgaaatcctaccacctggcctaaatcacaagggctttcgcaatgttgcttccctacggggtcatgactatttcagcccacaagggcgactggcactctgaagatatttacctggatgttgagcgatttatgaatgcgatgaatgtagccattaaggcaatgtataacaagtgtttgcgaagttatgatgtttgaatagatcatttttgccacattaagtctttctgttttcaatccatcccaatcgaaatatcgccttgcctgggttcttttactagctatatctatatgttgaaaggtcacctgacatccattgtttgctcctgctatatagtcttccacaaacctgtagacagtttcttctttctccccacaaccgagaattttctagaatcacctatctccattaagaaactattagacagtcactcaccattattatactatatacatctttacaacgcatacaacgcttgatccgcctatatctaaaagcagtgatcgcatctcctacctcatcgcgatttgcatgattatcgaagctatgagtggctttgcaggagcttcagcaaaacatatgtcaagacgaagggacatcggagttgaaacatcgagcataatttgcagtcatctcttcacgcctcacaaattcctcttataccaacgctgagaactgtgtaatcacccagattaccggccgacactggtggcatagacgtgtccgctatcctcgaagagcgggacacctagacgaccatgatgactttgtttttcttctgtgtatgatcgttataggcatctacaacaccgagaaataaagcaatcacgagaaatttgacggtcaatgtccccacttatgtgacgaatcctccgatatgttgactactaccctactccccatggtcttatacgaggatcccttctgtgagtcctttccaccaggctgttttacggtcgtaccactaacatttcggtaggatgtggccacgaggtataaccagttcctggctatacgagtccactttctctactccacccttcctcaattactttgggcgcgttccttgcgggacaaagctcataggatcatgagtggaaggttcatatcctagcttggtgaggggcaccaatagagcagacagacaaagggttgttggctggaacccagatttacatctacttcgagtataacgacaacactgtacagaattcggggtgggtgtttgtgaagagtggaagaagatttgcgcaacatgtttgtattattgctacttgcccacagtctatggtttcggtttcttcatcacatttgtcacatatcatgtccatgaccagttccatgttccctgtagacattttaatatagaattgccattttatcgcaggtacgtctttatgagagaagctactgtgcagaataactagtatggaaattcgaattatactattgtgccattattactttaaagccacgctgctttactcgtataatatggacacatcaaagtctaacataattatagcaatttaatcaaacatcatctcgtatcaggcacgcttgcagcatagactcaggttataccaaagtcgtatagaaattatagtagtttgattcaaactctcattactaacggtggcatcttaggttccctagggttgtaggacaaaagatttcgtggaaatgagatgagacaattattagataatattaatgtactaccttgtcagaattgttctcttattctagcagtaagttgtcatatattgcacgagccgacctagccactatcgtcatgtacacagggggcatctctgttatcaaaaatgagcatgttttcattgtgtacaaggattatgtggttgagtttgggccctctgtgataaccctgcatgctcagctagtcagttttggttttaggtgcatatggccaagtgcagatctcattcattgggcgtgggtgaatggagctagtcagttttggggtttgttatttggtatctatttcgaagcagccgtactagccccaagtgttgataatgaattccgtcgctttggcgatatgaggtgaaatcagagggagccatggaggggaaggacgctgaataaacaccgaatccaagctgttgaaaagaacgtatactcctttttcctctctagatcccgacatcctccttctcggatattctttgtagttgagtaatatcccgaacaacatctctagcagactgatattgttgcttccagcatttttctgtgatataataacaaatatgctcttgctcatcagatggaaataccccttcctcatataaagactctatcttctcctcatcatcaaagctatctagctccggaaagggttcgtgtcctgtcatgatgaaataaattgcggagccaagtgcaaagagatcagtgtgcacatccgcatagtccccgtgaactcgcggtcgaaatgactttgtacactcacgagatagcccatctagtaatgtttcaccatcactcgacttgagcatgccttggaaatcagcaagtatgaggtccaagttctcatcaaggagcaaattccgaacatttagatcacaatggataacacgctttgaatggatataactcagtgcctcggcaggttgttggcaccagttaagccttctttcgagaggaataacgtgatccgaggtgatatagtccattaagttgccgtttggagcatatcccagaagaagaccatgctcggccagccccttggattggattattcgcggatgagttccaaggatgtcgagaagttgagcctctacttcaaggctttgccggtccccaggaacatgtgggtatttcaagacagtcgtgtcatcaacaaggccgatgtagcttccaccaccccaaccaatgatctctgaaacccccggaagatactgatggattatccgaatttcgatgtgggaggcgggggaatcggatatatcatttccagccggtgtcgtatcctcctatattaattagtaattatacacagtagactaaagatggccgagacttacaggctctggtttcaatgcagtgctcgctgatggaatccagccacacaaagccctgtagacggaaccgaatacaagattaagcggataacatatggttctgaatagagtcgagattactgaaaacattatggaagggttaattattccctcttcttcgtgtcttggcttttcgaatgtactgggacgtgagaagggggaatgggtagatgtatgcaaactatgcaaattttaaaatatgcaaacccctgtagctagccatggatgtatcggctaatccccctatttcggaaggagatcgggttgtttgcatgaaacggggttggaagatattcatgcgtttaaggactgaccgctacagtcattggcccagtacgtagcccagtcctgcggtaacatatttgaaggtagttgccctttgatctcaaatgagatatatatgatgattcttatattgtatgaggagaagaaacctcaagcagcagtaatagccaacctaatccccctcctcttcctttcttccatatccatcgcctccaacatcctcccaaacccgaccctctccctcggctcgcataatatctccctcaaaccctccctcaaaaggccgacgtccctaaccaactccccctcaacaacccccttagcaagaatatcgcatctagccgtaacagccaaatcaaacacatccaatcctctaaccccaagaatcggcttcacccactcctccccaatcccaaacggaatcctctgacccgacacaaccgcctccccagtactccccaagacactagtaaacctccccagatccaaactcaaccccaactcccgcaatccctccaacgaggcgacaacatcccaaaaccgcacccacaactcatcactatgcgtatgcgcatagatcgaccctttatgatccaaccccgccatcggcacccagatcggcatccactggaccgtcagtcttgaaatggcattccgggcaacaggcgacagcgacgctgcgaatgcaatgaaggtgtatagatcgtcgacgtcgaaatgcgaggctttatacaggattggctctgcttcgaaatagatggcccgacagacgcggagcagggcactgttgctattgcttagggttgaagggagaagggagtgagtgtgtgggtagaggagtctgtcgctgtggcctggcacgcggccgtcgtagatgcgccaccgggctggggttgtggggcagcagtggcggttttgggttagggaggggtttgacggaagttgggagttatggggcttttgatgagggctttgggctggggttggacagcgcacatggcggattttgccttttagttggactaagtggatggtttgaggggtttgggtgtttggagttggggagttggtgaggacataggaccatattatttggcggagttcaggtggaaggcagagaaggggagaatcttgaggttcgaattggaattggcttgatgctgattctggattccagtctataggtgggtggagattgctctctggagagcagattgcacgtgattggattaaatcgcggacggtgtcgcgccaccgatggccagttggataataatgccaaatagaatagggatcacgaaggacccaggcgtcgaagtggcgcattgggatgtatagaagtgaagagtaagaaatacggggaaattatggggcaagtgggcttttatggagaaatccacaattggtatagactaactagtactggactagacttatatattgaggtcttggttgtaacctaatgacgtcgagacagttggatttgggatttatcccgtggagagggcataacacagatataatgcaaaagtgcatattataaagtgctatatctattgaagattccaaggttcgtcattcttttcagtcatgtacgtgtagttagggatttgcatgatcacggcgaattaccaactgcggtctagcgtatcttttcgggtttagcgtgtttatatagagtccggccgcttcaactttctgctttccctgcttttggtgctgccaagtgtaaggggcctgaagtacgtcgtcattgttgtcgcccgtgcgcttggcactcctacaattctatctttctaaccatagagcacatatttccatctttcataggattgtacccttttcattcctagacttacatcgtagcatacagaagtatatagacaatgcaatggcagagggggctcctagccaatctaatttcagcaaaggatagaggtcaaagcgtctacaccctaaccctaaccccataacgatatatacaaaggcttaggatgcaagcgcaaaactcaattctcctgttctgacccctgcgctctctcctcatcatcggcgtccttgaaactctcatcctcagtggcatccttgtatccctccgcatcacgatactcctccactccactatcacttccgttttgggcaggactctcatgcgcaaacaccacataaatcgcacaagccaagataatcccagacccgatccaactaatgggagtgagcgtactcccccaaacaaccttatcatagaataccgcaaagaacatctgcatataaaccatcgacgtagcacgcgctccctgcgcgacaggcttcccatccgagaccgacgcaggcgggacgtacgacaaacccgccgtcaacaggaactgcaacaagaacccgcagataccgagcccggtcagcagtgtccattcaacggccgtaataggcactcggaacggcacagaaggcacgaccgccatcgcaatcaaagaaataatcgtcgtcacggacgagaagtacgtcacggacacgagggggtgcgcacgacggccgataatacggatagtactgtaagcacccgaagcgccgatcacgccgatcaaggcgacgattgtcgccaggatgtggtggtaggagtctgtttcggagggtggtttttcgactgccgaagtggacaggcctaatgcccatgcggcggctgcggttggggttgcaaatgagacgcttgggtcgtgcttgccgaaggggcgggcgatgagcacgacgccgccgagagagattaggccggcgcatagctgttttcgggaaaaggtctcgccgggaatgaggagcgagcaggcgtagcaggagatgattggtgagaggaaggttatcactgttgcttcggagagggggaggtattgcacggagtagtagagacagtaaacgccggtgaagccgaagagggcgcggaggaggaggagaccgcggacgggacgtgtgcctagtggggagggtgttgaggcgatgtacatgtataggtagcttgcaattgctgttatggacatgcgggcgaagaggatctgggggtgttagcttggtttgtaataatggaggtataggaatacggatatgtcgaaattatgtgatatcaaacatatcttccctttttctgtctcttacctggaaaggatgcatagagctatggatttccaagatctgcgtcatgacattcatagaggcagcgaaggcctgcgacagtaggacaagtcccatacccttattgcgtagccaccatactttccatgcacggcggggtcgcgcagctgcagcaatagcggcagcgtcgtcatattcatcgtcctcgataggacggggttctgattgagccagtgctggtcgggggtcggcttcgctaccactttcacagttgtagtcatgttcatcctcgccttgagtttgtgaagatgatctcttggatctcgggttcgatctcgactgctccacccggatcggcagcggtgcgtccggatgatcctcgtattggtcggcgcctgaggccgaatcacgttttgaagccatgctgggatgtgagatcttggcgtcgttattggagaggcgattggtgcggggattgtgggggatggagatggaggtatctaagatgacttttcctctctctgaaatcggatcggattattcttctatagagtctgagtgtacagtgttctcctcgagaagagatatgcagataaacaatatattcaggcgaaaggaaaggattcttatatctgcgctggactgccgatctggttaaaagagatttcagctcgaaatgcgcatgacggccgagtggagcccccgttgaccactgaccgcttctctttttactttcttcttgctttttctttcgacttttcgtgacttccatgatctttgaatcgacttgactcgaactggtttgcagatttagttgccttgtccctggttgtgtactaccatgtactccggactgtacaagaagcacaagcggcacacgacctacctcatgcacgatctactagctacatataaatatgcacctaacggatatttatccgctttcctttcctttctgtgtttcatttcatttcatttctcattcaagtttcgatttgcgtgatattgcttactaatcgccgcttcaagcttccaaggttccaaggttgggaatcgagctacccagagatgagctttgtatttaagggtttatgcgatcggcttaagtcgtagatctagcgagctagactatacaacatacatatccatgtcatagaaagccacagggcccatgatctctcagagttgaaatcacatggtctgtgcaatatatcctcttgcacttgagtggaacctcagggttggcttcatgatcgggaccacccggatacggttacatagtattctgcgagcagcctagggtagagatacaatctgagcttcgtagtacacattaatccctgattctaatatattattacagactcagacaaatttgcaccgaagatatgttatagtttctttttctttcgttgcgtggcaggccgaataaatcgaatggtacacgtatgtacagcgttgtattcgatatcacgtaggcttcatagtggagagcttcttcacggcactcagggtcgagccaatcatgagagaaaatgagagaaaatcgtgcaaagtcggtccgaacccgacccaccaatcccgaagcggaacatctaagacggtagatccaagtcctccatacagactgtcgaaggacagaaagtgtgcttctctttgagtaagatgcgtccttagtacagaggccgtacttgtatgtttccatctcactatatgtcccgaaggacaggatagttatcttgctccagcttatgtatggaggtggaagatactcgaccgtggttggtcgattattcaagatccgcttttcgcgcaatgtggggtttgaacacccgacatcactggctgttgtatcacgtgacttccaaatagcgtagggccagttatgctatgtatcaaaaagacccacacctgtataacctcaaaaaggacatgtaaaagaaaaaaaaaaataggtagcttctctttgattgagcgtgtcatccttagtgcaggggccatgctaatcttctctgtatattttcatttgaccatatgccccgaagggcgaaatgacatccttatagttcaatataacctcaattttcggcataattataccgcctatgtattactttgggcttaggcacgtgataccaggttacgtaatactttacagtccacagcagatttacagttctgttcaacctttatatcatgcattctctagatctggttatttcggttactgtatccacttgcctcaaacacctaccaaagaaatagtacatatggtcatgttcgttaagacaaatgatcagttgctgctcacagatcttcatcaagaatcagaaagagaacctgttataagtcattcttaattgtttagagtaatttacacacgctaacaagagttgcggtcagggtagttacagatttaacatacctaaaatagttagttaaagtatgccgtaagtaaaatgactataccgccagtattatgtccgacggcgaagtgtgaggcacctacggggtatgtatctagatgataaacaaagaacagtgcagatgaagtggtatgaaggcatagttcatacgatcacaataacatcgaccttgaaaagcatacacggctatatttatacaaaagtaaacgtatcaccccccttctcccgcaacatatttccagtcctcgaggtaccaacaacacgctccaacttcagcgcatcccacttcgagaacagcgcacgcacaccagcctcggcagcctcgatcaaagccgcaggatcaagacccaagaacccaacgatctcgccatagaacagcgcgttatctgggagcccgtacatgaccacacgcttaacaccgcggatctggtaacggcggaagtggtgcgcgcgctcggtatacagcagcacagagtggcggccggacacgaaatgactgcgggcacggttagcctccttcggctcagtgtattcggagatagcgccaaaggagacattggttgtttgcgtggaggtggcgaagtggttacgcacacggacgaagtcgaggtaggaggggatgaagatgagggtgccggcgccgcccttgccacggccgtgcgtgatgttcttcaccagagtggacagtatagttgttgtgaagtgcttaaagcgcgcgtcggggtctttaatgggcgacgtgctgtcgatgcgggtgaaggtttgcttgacggggactgcgagtgggagctcggttatggcaccggcatatatgggggttgctttgaggcgacccgagacgttttgcatatgggatgagaagagggcgttgatctcaggcgtgatgaaggatgagaccactacagtttgtcggacatagcgggcttggttgtccaagtaccaattacggacacggccaaagtcgcagccgtgcgcttgtttcggttgcaagttcaggtgctggaagatgtagtcgacgtggtcccagttctgcatgagcatggcatcagcgtggtcaaccactaccagctcaatcgaggagaggaaatcatgatcgcgcttcttgacgtcagactggtccatgatcgtacgcagacccagtggactggccagaatgatgtcggagctgtagaattgcgcgaaatatttgactgtcttgcgcgtgaacttgagacccagtcggaacatgtcgtcgtcattgccgccgaaaagttcccggaaatcctcggtcttatgctcccaggactcatcattcggcgccgagaacgagtcagtgaaacgttttttgttctcttgctgctcgggctgatagatccgagtgatcgcatcgagaaccttaacacatgcttgtcgagtaggcagaatgtaaagcaccttaggtctggtaaatccttggtcacggcactcgatatcggtgtccgggtccttggacaaacgggcgttgttttttaggacttggtctcgggtcttcagcaggtgattgacagtgtgcaaagcaataatctcgcgcatctcattcgcattagaagcagtacgggcaccgtagagaacgtcttggtagttaaacacatatggcgcgatgatctgggcttgaccggtgattttaggcaggagctcggccgcacgagccttcagtttttgtttaagctgcgcgattgcatgttagtatactcaaaatacaactcatgtttattccgcataccttgatgttggtcgtgctcttcattggcggaaggattgatggactgttttctcccgtttcgggaacagtatgtaccagtcgtagcccatccacctctttcttgacggatgcccatttgttcgattggataggctcaatctgcttgatcaaatctgcactctcgcggagatcgaagtgcttctcaaaagcagcagttgggtcctcgtcctcgtctacctcctcctcttcatcgtcggacggcgcttgggcttgcaaatcatcatcgccctgctctggttcctctggttcctctgcggtttctgctatttgaatctcagcatttgcgtttgcgtcggtggcaatcttgcgcttcttccgagctggtccgctggactcattgggttgaagtagctgaaggagttcattgtatgggcgttcagtattctcgtcttcttcgtcgctgctggaaccctcgtccataacggtctcatcaaccaattcctcttgggattgctcgctagcatcatcttctccgccagaagaatcgtccgatctagtgataattagacacagtcattagactccagactgtgagaacttactcagactcgttcaatcgcgaagtcgcaaaggaattgcgaccaccacgaccaccgcgaccgccgcgaccacgacctcggccgcggccaccacggccaccacggcctcgagctcctctaaaagaaccaccacgaggagcaggcatgttgcgaataactggaaaagagtgggcaattccaagctgttctggccgaaatgagaattttgggggcttatcttatcttagcgcgaaatttcccacacacaacagaatcggaacaatcagagcggctcactccaccaaggaaaaattgaacctccgagaaacgaaggaagtttggatcttgaaacttgcaagatattccatccccccaaaatcaatcatggccgaagattctttccttcatctcgctcgccccctcggccccgttagtgtggggaccgctcctaccactgcccctctgaacgtggtcatccaaccccaggtatgttgcgatatgtgtgtgctatatgatctgaggggtaaagctcattcctcccaaggcaatcttttcagttctcgaccactctcttcgccgcaatgccgaccaggagcgagttatcggtacactgctcggaacacgatctgaggatggaagtgaggtcgaggtccgatccgccttcgctgtcggccactccgaggctgaggaccaagtcgaagtcgatatggaataccacaagcagatgctggctttgcacctgaaggccaacccacgcgaagtcttggttggctggtacgccactgcttccgagctcaacactttctccgctttgatccagaacttctacagcggccagggtgatggtacctggcctcaccccgccgtccacctgactgtctccactgaggctggaaaggatctcgagactcgcgcctacatttccgcccccgttggtgtcaccgctgagcgtgctgccgacagcgctgctttcatcccagttccctacgagctccgatacggcgacgccgacaagagcggtcttgagtctatcgccaacgctaaggatgccgaggaccgttccacttccgtcacttccgacattgaatctctggagcgcgccattgaggaggtcctgtctatggttgaccgcgtctcgcgctacgttgagtccgtgatagacgaggagacccccgcttccactgccatgggccagttcctgcttaacgctctcgctctcgctcccaaggtcgagcctgccgacattgagcgtgacttgtatgttaaatctacattatattccctggtgtttcttgccactaactttccacagcaacaaccacatccaggacgtcctggtcgtttcttacctcgccaacaccgtgcgcacacagatggagctttccactcggctagcgaccgcccagcttactctcggcggcggcggcgagggccccgctaccggcgaccagcgcaatcagcgtggcggcaagggcaacaaccaaggcggccgcccccgccaggaccgcaccgaggagacccgcgcatgagatgtttcccacagcaaaaaacgctgatgcataatgtgaccaattgcgagaggaacactcctctccaagtgaacgtggatgtctcgtctcacgttcccttccctttctatctcacccttccctgacattattacttttgggtctttcgcttcttgttcaccaaccctctaccgccttcgtccctttttttcctttttccggcttcctcttttttttttactcgcgaggcttacatgttctctccggagctcacggactgtggcctggtcccatcaacggcttccggactcgctctgttttgacgttcaaacacggtcttcaacacctggtgctgtggtattgagaccgatttactatcaatatgattggtataacatgtggtgatggttgatgaggtgacgatgtcattaccgttcgacgatagagaatattcgggggtgatgagtctagactgttgaagatgagagatgggtctgcgagacccgatctctccggttacgaagtcgcatctttctaggcgcggcgttttcagttatgatgaaatggacataaaagttctagagcttcttcgtattgtatatttcccaccatttactattccggctatagccataagaggctcacgttatagtcctccttggtcactgaggtttcgtatggttccaattctatctagatatcaagcatttcttgtcggctaacgtccaacatatcagtatgtcacttaaatgcgacagcttcaggcttgttgctatactcttcatcgtcctcttcatgccggaccacccacctgttccggctgaactcatctacctgtgctactcaagcagcagtaattgataagcaagctggatggaagacacgcttaggcttcagtattgagatgttcaacctctatgtttttgttgcctcgctcgcaccgaagagtctctctttttgtcttcctgaaagctcagatggtggactggcgtgagtgttgacaagatggcatcggacgggcaatcatcatcataatctaagagaaagtagagattccgaagatatattcattgactagttgtatacttgtcgggggtccgaatcgaatgtttctgaggacgcggaatgcacggctatgagttctatttggcgcaccataacacggcctttgctcctgcgtgcgacatctgattttctaggggacaatgtcgccaataaggtagattcgaaggaatatttcctggtacagtccgtctggggcatcatgggggaggagccttgtcgtggatctggtatttccggtattgttccgcggttagcatagtcaaaaggtactttcttgtcttttttttttacgactagaagcctcacattcaatcagataccgtaggtctattgagagagatacccatccaaagttggagatgtcgttaagctgggaggggcacggatttgacgagattgttgtcagtctaggactgcagctagaaggcttatatttgttgaattttatggaaggcacaaatggtgtattagtttacaagttagcctcaatgtaggtatgtgcatgtagatacagccctagacctcatgtttcaaagtggggaaggaggctggcggatctgaaccttaatactttaatttgactatggacgggaacaatgtagagacgactcaggctcttggcatggttctactactgataaactacagtatataacgaacgtggttctagcctagtttgctcctatcaccgtggtcaaagcgttgtgatgtcccagtgattgcatcgggcgagtgggagggcgcaaatgcgagtcccgatgtctgtcttacctttgatataaataaagtgagcattgggatttgataaatttccattgtatttctctagttatttcttggtattggaaaaactagctgtaaatatattggcgaaaagaaacacacgttgggcattaagtcatgttcgtcgtgacccacagcaactgggcaggaattggtggagttattgagggtatatgttcagccaatcgtcttacgcttcttcgaaactgactcctcggtagcatcagatccacggcgggttgcagcacctcttttccccttgcccttactcttcttggtaacagtagcagcggcagcggcttcggcagccacaggatcctcgccagcagcagcagcagcggccgcagcggcagcacctttctttccagcttccttagcaacctgatcatcattctggtcaaatgctttgcgagcttctttcaattcacgttccatgcgcaacagctcctgtacacggccgagcttgttctggtcgcgacgcagtgcgaagcggaagtcctcaactttgatcttctgacggcgggcgtggtgtgcgacttgcgcggcgccgtggcagagttccaacacgaagtcggtgacaatttcgtccagcacgcggactgtctcgggaagtggttcgttcgggaagctcgggtgtgggctggggtcgccgtaggcgagaaggagcaggcgaactgttggatatagttagtattgaatttggctttgtaacttctattaatgaatttgcatgggctgccggaacttacgttcattctgaaagttcatttgacccttgtgccgggccgtacgcgcacgtggttcggccatggtgggcttggttgtagactcttttttgtcctttctagtcgatgtagatgccgtgtcgggtgaactaagagtccacttaggtccgtatccggcacaatttagcactgtatcttgctcatcgaagccccaattaggcgagagttcagagacaagagtcttcgagctaggctgacgtgatggattgcgagtcggattggacgagtcagtcttcgaggttgatgagaaggtgcttggagcttggaggtgagcgtttggaggtgctgagattgtagtctcaaagggacagattggagtccgagtccaggtgttcagagtacccaatccagtgtgtgatggcttaagaggtagcggagatgcgtatggcggcaaggagaatgatacccgcttggccgcttggcccgtgcgcttggcggacataccaggcagaatatgctagactgggggttagttagcaaccttagcacatgcaggtacctggcaagttacggtcgcaattctctttctttgcccaagtgacgggtgaagggtttacagttgcaacaaatggtgagtttatgtaaatggcagaatttacgagagcaacttttctgtgagaagtatatgtggcttggctttcgcgtggcgttcatgttggaaccacaatgatagtatgattactgtgctaactatcacactcacctagtctgctcttttcaactttcaatcgttgcttctcgtgattctcctgataatctgcacgagcagctatgcgcactcgataatgccggggatcatggaccggaaccagaatgggtaggcgaccacctgaggatgcgcatccgggatgcaggaagatgacggggagactgatagttctttgatgtaggatctttgggatattctggaagtctgctcgggtcggagagcgactcagcccatacgtcagcatatgctgtgtcgtgatggcagtaagttctctccacgagtcccgatgtatgaagaaatatacatactgatgttgcatgcaggtgtcgatcttcttcggtgattaacattgcttaagtctcaatgggtgtttggaggggaattcctacgtgataatcaatgcttgtggtagtccccaacttcgatcggacctcaagtaaccttagtcgggggttataagagattactattactatttgcccttcacgtgatggtatccagatgcaatgagatattcagacgaacaagaggttcatgatgcggtagtatatagtacataatattaaaatctacaaaaaaaagttccaaggcacttcttcaggaccaatgcgtccaaaatacttgaccctccaaaggcggcagtaaaagacaaaagggtattcctattttacatcttaggcttcaactttgactccaacttctctaacccattgtcaatgagctcgtcgtgcaccttctgatcactgtgaacattggatgcgggctcgagggtgagaagcttattagttccatccgaattaaggccctcatccatctcctcgatcgccacccagaggcgttcggggtcgcggagataacgcaaactcttcatcgtgtaatggtcgatggcaaagccttccctttccatcttcgtgattgcactagcagtttcagggatggcctgcgcattggcgaatccattgatgatggtgttccaagtcacctggttgtactccacattgtgcttggccatcatctccttgactttctcggcggcatcgggctggcgactgtaattgaaggcactgaggaggatggtccaagtacgatgcgtgggtgcgatgtgcttgagaggtttgccagtgatagtttcttttggtatggcagaggtgtcaagcatgtcttcgacgagacgtatgcttgaccttagtccacggctgcttttgcggaaggcgatgaggaattcattatagacgtggtcggtctcgaccagaggagcgatggatggatggccctgctgcacgagctcgcggaatctgtcatacatgtgatgcacttgtgatatccgattccgacaacggaagaatgtcgcgatcatgaggaacaaagatactggagatggtggggttttcaattcaagtccttgacttggcggcggtgagtatgagggagggagtagaaggagttctttgagcggtgtgatgtcgtggattttgttgtacatgtcgagcatagagtagaaaactcccgagggatcgctctcgggatcaatatgcttggcggtaaaagtgaaatgagcgtggaagattttgctgaaaatgtatgggttgtttcgtaattcctcttgcatctcgacttcccgcaccagctcgtccacacgaccccggtcgcctcgagacaccgcatcagtgaggagagtcagatatgtataagaatcgaattcgtggtggtgattcttcatgaactgaagcatgtccgaccccaattgaggatcaccggttttgtaagcattggcgagcacgagattcatcatgtcccggtctggctgaacacccattttgagaagccgtgggaggatccggaaatttcgtccgctggcgttatcctcaacggtgtccagggtcaggagcttgcaacagtgccgtaagactccttcagagtccatggaaaattcagggtcattgattttgggaatgaattcgagagccctaagggcatattccacgtcgttcaactgtgtgaatcggtacatgtagcaaagtgctgtttgcgcttccatcgtgatgcctcgctcgttcattaaacggaaactctcgtagacacctaagaagcccgctcggcgaatatagaatcgtatacccctttgtggcggggagataattggccagtcctttggatccagggaagttgcaacaaccgattcgaatgtgtgggcaccctttgtccaatcccggagctcttcataatgaaatctttccaagtaagtcaagcaatcaacaaccatagttaaatctggcttatctcgtggctcagttgtgacgagtaaaaactctaaggccattgccgggttattttgcagaagccaaatggccaggcgttgccaggcccaagccctgttagggcgggtcattgccagccatgcctctcgaaacttgccttgacagtcttcgagaagcaaggctagcagttgctcgccatcttctctcagctttggcaatgcagaattgtgcaagacctcacggccatgtgtcttagccttgtgaattgctccatatgcctctttccattgacggagacctagctcacgcatgtaaagtgaattcattcgcattgaaagcgccaggtataacccgcgatcggtcaaatgtcttcccttgtttaagatttctcggttgactctctcagccgccatggcgacaagcttgggatcagcttttcgcacataagcgaccttcttcattttatcattcgttataatcggtgtctgtgatgaacttcgtggttgggttgaaggttttgattgtccatggtctatgccatactgatttgtcgcgacctgatctgattgttcacttgtcggcgaatgtgaactgtcggttgaaccgcggttgtgttgatatgatatggggtcaggagcatcatgtgtcacaccaggttcgaagattgcaggagcattgtatgtggagaggcgcactctatgaccaacattcgtccctgactcccgataccatcggcctagagtccgacattgtggtgacagcaacccgttgagacgggaccgaacgagttggtgcggacacgatgacattcaggagcttgtacccgcagacatttgggggaaagaccaagacgaagaaaataagtcaagtacagagtatggcgaggagtcaaagtccaatgccggacagaaagttgaattccgccattccgcccgattttgccgtggctagtgtgtggcgcaccacatctacttttatcgcttcatcatcttcaactttgaagcagcggaggagcttgcgaatttcttccggtcatacaatcactctgctttccagtccccaaatcccagatattccattcaccctcagtttaaccatcgctcgaaaacatgtcatcaaaccatgccagtcttgatgcggcatccaccgaccgcaaagcccgcctcgccaagctcgcagctctgaagcgcaagcaacctgaagaagacacaaatgaggccagtgcggaagaccaggagctgcctgacgccgattctacgccagatgtgagcacaaaatatctatccggccgcaactacgaccccgagactcgcgggcccaaactgggcttcgagcatggcccgcaagagggccaggtgacgctggaagcacaggcggctaaaattgcaagagccacagcggaacaagccaagaaggatgcggatgccgacgaacccattgatctgttcaaactacaacctaagaaacctaactgggacttgaagcgcgatctaaacgaaaagctcaagattcttgatgtacggatggaaaattcaattgcacggatgttgcgacagcggttagaggacgcgcagcgtgatgcgaaggcgcgtgggcctaagtctaacggagacgagcagggggaggaagtgggcatggagggtgaagcgctcgttgagggcatccatatgcgcgaacgagaggaagcaaagagcgacgaagaaacgatttgaacttgataccctttgtgttgcaggaatgcgagcgttgtctaggtcttctgcctccacctgtaattgtctatattctgtccatttaacttattccttttttttgttgtctcggttgaggcgtccaattgatgccatgggcatattgcgcacaaaaatgaggcgttaggaggtttacaaatcaagatcctcaatgagcatatctatcttagtgtcgttcagaaatcattattggattttttttagttccgctgtccagtgacagatactttcaaactccgcaatggagatgctaatgatacacttagtcaaatactgatggaacacgaattggcgccgtgttccccctccatcaagattttgcgccgtatgaagccctaatattgcagagcaggttttcaattcactttaccgtccgttattcatggcttgagtcaaagcaaggcgcttactgaaaggactcaagcttcgttcccgaggaagctggttcttctccattatgggatcaggcttagagcgtccagattgagactgacgtgatgggattgcttgatcacggtgtgaacggtcccggggaacgtcctgagtcgtagcacgtgattctttcactcgatccttatccacactcttgcttcggcggtcccttcgctcgctatgtcttcctgctccacggtgacgacctcgttcttcggggctagattctcgtctccgtcgccgggtgtttcgatcgtcggttcgctcttgggagggtgagcggtcccttggtcccgagtagaatgaccctgaagaaccctctgttgaatcactgaagcgtctctttcgggactttgcaggtggtgctgatgaatcatttcggcgacctctgtcagatgcgccgtatttgttacggcggggagatgaggaatcggatcgattcgtagatatcgtttccactgagagggacctagcccgcttcggagactgaacgccgcgatctgtcatatcctcaaggtctctcttccggccacgctcttcctcccgagtagcaaggagttcgtctgccacaccctctcttcatacaagttagcgaggactccaatgcaggaaaatgcagaaatgacaattattcacgtgaacttactttcgcaaaaactcatttggattctcacttgaaagcttgggcatcaattctggattcagtagctgctgagtccttgaaggtcgcgggacatatgggcgctcttgcgcggatgccttgcaatcaaagctatagtgtcgtggatcggagttagtcaaacgtccaaagagcaaatgaaatagggtacatatctcgtccaaggcatttttggcacagtgtggtcgcggtggccctgttggagttggagcctccaagcttcggggcgtttcgatatcggttcattgggactcgtgatgttgtagtttcgtttagaatcctagattggcaggtactttaggtctgaaataaggctattgacgcgcccacgataagaaacacaggcaacatccgacgtaaagctgatcggcgcaaattagcgtctgttaccctttgaagcctaagggaaattgtaggcgcgcgccaagggcggtcgggcgcggcataatgcccacgaatcttcaggtaatcaagaattcagaattcagatccccaacgctccttctcgatctcggagttcattgtcaacattcacgtcatccatctcggacggacgatctagagttgatcggctcttcaaatacccgtcggatctggaatcccctcaaaactcggtacgagatctccctgactatgagccagctttgatatcatgtaaggccccgttgcctgatccgcctagacttctcgctctattgaagtggatatttctcctcattgatcctatggatccctttactttcatgcatggtgctaatgcgcattctccacagctttctccatggcgattgccctaccccagagatatgtctttcgttttgggcttgtgtgaaacgaaattacgcagcgacattactttcaaccaaacaagcttccaccttcttcacatttgcaaatccgaagcctgctgagtgcagctgctgcttgaccttgatctcggattttctttttttttttttgtgaaatttaaccagtctcagcgaccatcctgcagagtgttgtcatggcgtcaaaaagtcccccaggtggagacggccctctctcctttgcaaaggtaagctaagagtttgctccactacctcatggctcatcgctaattccgtgacaagatcgccgctatgcccgcccccctcagcccacattcttcctcggtatctgatgaaaacgaaatatgcgagccagcagaccaatcactttactcaaaagcaaatggctccggtgcatctttgcccagccagcataatgtcgataaaacgccagaggctagttccatagaactagctgttgatgatctagggagaggtgtgcaagacattagcatcacctcggaaaatcacagtgatggaccaagctcgtttgttagcggccaagatgatggcttgctcaagcgggaaaactcttttgaagatgatcgcactcacctttctacctcatccacaaaaatgaccaactttgattccaagagtcttgcctcggtgacgacctttgcaatggatgaaaaggactctgtacgtcccgatgatagtgctagtgtgcaagcgattgatgaagaggagtcgctttccggacttgcttctggggctccaaactcagtggcaggctctgaagctggcagtcgtgcgtttcgggatcattaccgagatggcattcctacacgcccacgcggaattttgcccgtgcctcctctctttggcggtccccagccggtgaatggtgcaattcctccagattcaatcgcgaataatttcgtgattccagccaactccgatggcattgaagatggtcagatattacatgggtttcccttggagccggatgaaaaactcctagaggcaatgaaatcaccgaaagatcggctgctgatcctgcaattggaggaaaaaattcgacactttatcaaggactgcaatgagcagtctctagagttgcccccctcgaacgcgtttgggcgacttcttgcacacaagctaggagattactatcacttaacacattttgtcgataacaatgtgacatcggtcaggcttcatcgcacgccattctgccggctacccactcctttgtccgctgtgcatgctgcttccaatagcactccacctccagctgtcccggcaatgaaaatcatgcgccgaaacgatggagggcaattcgaaggaagtattggaggttcttcaaacccttccaagaccaactcggaagatggcgatagcggaccagatggagaacgtcactggtcttcttctggtgctacacacgctaaagatcgtatggctttgacgagggaggaacgggaggcaaaataccatgaagtacgtgaacgaatctttcgtgattttcccgacagtgccaaatcagatccggccagcggtgactcgaatcccaacatgtcacgctccagctcggcgaatgggcgcaaaaaaaaccagaggcagcgaactcctcatgatgacagctttgaggttcgctcgcagttcaatgcctactacccaggtatgcaatatggaaatggtgctgctcagtacaatgctcctgtaaatgacagctcatatccaaaccaagtaccttacttggtgggacctggcgtgccgccaccctctggtggatacatgccatctagtcggaatggtgccatttaccctgggcaactgaacatgaatgtgaatgtgaatggctcccagtttccagtggcaatgtcgcctcagatggcctccaatagctcgtggcaaggaggaaacatgccgcaacaatctccatattccgggtatgctacgatgaaccagcaggggatgatgaaccagccgtcctcaaacgcttcctcgccggcaatgaacaactatgccgtgcccaatgtgaccccgtatcaacaaaaccccaattggaactcgcctcctttccccacaaatttccagcagtcccagcacccacgaaatggaccgcctgttcactggcccaactatcctcatcagccaatggcttctaacatgccactcaacatgccgcttaacatgaactcaaacatgggctccaacatgggtcttaatatgagctccaatatgccgtccaatatgggcgcatatccttacgctcaataccccgggcagcatatgaatcctgctctccaaaattctgccggatcccacgcagcaatgcaagcaggatatgccaggtcacacttcaaccctcagacacgctcattcatccccggcggtgctcctctcgggcgtcacccgaacaaaaaccaacacccaatgcagccgtatggtaccatgcaacctggcgcccaacagcaatggcatgggtatccggaaccaagttccaaccggactatggactcaaccccggctatgaattccaaccgagtgcccaccggtcctcgagactcgatcgcgaaatggggcacaccatctcatcttccccccaaacccccgccttccgaagtcccttccgactttgatctaaaaagccgaaccgtcccggcctcggtcccagcaccaacatacagcaacaatggaatttccgccgtcagcaatggaccacttgtggtctctgggggcacaactgtctccaagccgaactaaagcttcacggttttggtcacctttctactaccatatgtgttgtatctgtgatccttgtgtctttggaagttgtggagatatgaacctttgtcccgtagtctataggctagattcatatgtccacatgcggcaactatcttccaaggcttgcatctgcaacagtacaatgcttggcgatccgggttcttgtgcatgtacctagtcgctcttagctagtcatgaacctgttcaacttatgtttcttctttctcgcctatttggaggacatagaattcgaaatggataccttccaaaacagtataagaatcacgactaggatgtcctatatgtaatgtagccaaatgattaaaaggagaatcgacttatgcgatgaacaaagtacagctcaaaacaagatggactccagtaattaagaaggtcttaagaggtaggggaggagaggagaggagagaggaagagatttctagagcaagcatgtactactacatacaagtggctcctataacacgtatacatgcctgaggccatctgataatctgtaaaataaagcaatattcaccacaatatacaaattaccaacgataagaggacgatggctcccaatgtcaagcactagtatatctagttaccttgcagggcctttgttccaatactattacatcggccataaacccttggaaattttttggaagcacagaagtctccttctctgatatactgcgtctcgaatcagcagcgcatgttaagccaatctcagacgaaatgccaaatagtagtagggtttattatgattatgtgatttacagaatagtatagtttcaattggttgaaagtgatatcacgtgtttctcttcctattttgtcgagttggttgaagagaagagattcaatcagtatgaaagctactagttcagagtacgaatagctattaccgaatatggtgcttacttctcgagttgcatatatgcctaatcaaactataaactatcagacaaagaaacagcacttgaacccccagcttttcacatccaagtctttagccctcaatatatacgttcaagttccctcaaatatgaaacccccatcagctcatggaatatattggttcgtaggcggcttatactgtggcctagactgacgggttccaaagatcgcagaaggaacaataataacaaccataagaacaacagccccaagagccgaaccaaatataatccactcacgtcgacgaggcctatgacgcctaaccgtccctatcacagactgtgactccggatcttgtttcccgtctgctgcagactgtcgcccactttcatctccctggcctctgtctgcggctccaactgcggcctcgacctgcttgtctgtgtgtttgtcgtcgacgtattgattgagttccaggttgtagtcccggtcgctgaactctagcgtgcagtcccgatcattgacttgcaaggtgcagttctcgttcatgctgtgttcgatggttggtcggggtgggtatggcactgcgacttctttgtctgtgtcgggatatggggggcttggagcattttgccggagcgggttgtgtgtttcgagtgacggtttttccatttcgagtattttctttggctatacttcttctgacctggtaggagatcagcaaatgatgaattctggaaagtacagttggggatatcggggtattacatacttcacacaagaaggttgcggtgtagtaaagatgggtatcgaattctggacaacagaattaagcactctatattatttggccggatcacaggtctcgctgggcatggaatattgtagaagagaattcgagactttgattatatcccaagactataagccagatgaataaatggccccttgggcaggtcggcttggcttgtaacagcattcgcttagatcatatgctagcgagcccaactattgataactttgcattgaattttattgtcccttgattgtaatttctgtgtgcaggctgcactagtctgttacgccgagctgcagctgatatatcagatctggtcaaccgccccaggaaatgagcgttgggagtctgcacggaattttggacattttccagaagtatttggtcattggtgactcaataaaacctcaatcggaagtctgattgccagaagcaagttttattttggttgaggatgctatggattctcaaatatatagttcttcaatttcctactagcattgttgacataactaccaaaccacccagaaactacttagtatcaatagcgatgcaataaaggcagttattatttgcggtgagccctctatttgatcgacattgcaggagatggcgttggtaaggctgttgacatcggtatgatttgaaatctgatcgccaggcagcacaatcggcaaaatgcctagttctgaacgtggatcatattgactggcggggccttcaatcgtaacatattgtccagcagttgatgattgatcttcagatctatataaaggcccgggataaaaatgtggcgacgtccctcccgcagcatgactcgatatctgcctttaccggaacccaataaaccaaagaagaagtgcgaataaagaggtatcaaaatcttttatacagaggctatgtcacatgcgcgagtgcaaacggagacgaaaatgccataatcaacaggaagaagacagaactcctggtaagaaaaacaagtaaagaacatagtcaacagcaacggagtcagcctcgaagacaagaggatgatgcatcgagaacgccgatcaaagcccagaagagaacatctcccaaacagatatcagagatcaatcacccccggccgaggattccgaaatagaacccccacaaaggagagcactccccacatctaatccctcgactcaacctccgcttcctgcttagcgagcttatcattctgcttcttggcaagactgagctgggaaatcgcccgctccaaaacgtcaacaccgtccttccggaactgcgtaaccttcttcacgttcaaccttgtgagagcgtgcacaagatcccggccctgctcgcgctcgcgagccacagtgcgcgccgtcatggcgaagcgcatgtccttcggcccatcgaccagctcgaggatagcggtgggagccttgacctggggcttaggctctcggacggcgtttttagtacccttcttgggggagaaatactcgttcttttcgcgaggttctatgcgtagcactcgtgtgtatccacctggacggtctgcgtagcgctcgcggaggggaccgaagagtttggggagcatttcatgtggtgtctagggaatgttagtgttgtcattgggttgcgggttcttttttttcctccaaaggatgatggatcggtaattgcagcaattcatcacaaattcagtaaatccatgaattctcgtgaccagaatgattcctttccgtattgaaatcggggtgggcttgttctctgggaattcaacatacgtagaaaatctccaatgcacgtcgccgactcgcttcggtgttcttcttgcccagggtaatcaacttctcggccaggcgctgggcctctttggccttgggccatgtcgtggtgattgattcatgctcgaagagggaggtcaccaggtttcggagcagggcctgtcgatgcgcggagtcgcggctcaagtggcggtatctgcttccaccgccggccatgatgagggctattaggcgaaagtaaacgaggcagatagagagagagcgggttattgaaagtagagtgggaatcacgaggtcaatggctcactaattacaggtgaaggagagccctggaggatgttcggcccagaagaattgtctcggccaatcggagcgcttccaccatctgtccgacttcagttttccgcgctcactctgtctggtcgacgacattcagcttttcgaatacatttcacctaaacctattgattgccgaggacagcataggctataatcaagaaatacttgtaccatttgtcgcattttcaaaccactcccacgaacaaatagacaatccggcgactccaagcaccacaacaaatatgggcttcttcactggatttgtacgatttaccctcgaatatataccagaaagcaggactaactacaattcacactcgaatagctcggtggctttgcctttacctcatccgttctctgcattaccatccaagtacaccgctcaacacgcatatcacaacggaatgccatccacgcgcaagtcgagcaaatagactggttgaactcctctgctggtgcctatgacaggcgcttcctaccagaagacgtgccaaggtggcggcgtgaagaattggaagcgcagagacaagcggagccgactatgaaggagatatttaagcatagatggaataaagaagtggaggccttgacaaggaaggcctatgagacaagatgggaggatgtgagacatgctgccgcggaaagctggaaggctgctgcacgagtggtgaaaagagaatgaaggatcatttctgaaaactatagcaaaggcttggctcgaaggaatccttagatgtattatcatgtccgcttgttttgggtttatttttgagcaccggagtttggatacccttgatttagttatgttataatttacatgcattagtattattatttccccgagggatattgtgaatgcgtccagcgcatcctcgtataggatagagatatcaatgcggtccggcaagactcggtgatagcccggatcaaccctgggacatgtacactcgccactgaagaataaaaaaatgcagcaaatgcagcgagggcgggactgcagctgaatcgactggaagactcagaagttcagcttgtattagttgatgacggtgcagttgtcgtgacactatctgagtcgctccagatatccttgctttcccgctcgacggtgcgcatggcctgagatacctcctccagtttagcaacgacatccaaaacgccctggttgacccggtcaaagtaccggtcattggcctcgcggcgctttcgcgcaagacggatgtctttctcggtctcgtcatccaacgtacggtacgataccgaaccttgacctgcgctagcttctgtcgctgattcatcttcaatacctcgccgcgccaagctagcttttccactggcttcttcggcaccgctgtggccgggatccacaacttcatcgtctgcttcactacgtgcccaggcttgggcgagcttcaactgtttcatgcgtaaatcttccaatgcttcagagtgctttgcgccgaagacattctcgctcgtcacagcgctaagttccacttctgacaaagcgttctgcatctcctgccagatggcatcggatccgtcgacatcatgtttggaggcgcggcgtgatacaaagggtgataacaagctcgacttctcagtatttgcgctctcggctagccgagatgaccgattccgtttcaggggtgggggttggccagaggcagttgctaacggtgaggttgcaggtgggacgggtaaggagatattagaggtattgtgtgatggtgggccctggaaaagggctggaggaggcagacgttgagggtttggattcgtgggttttcttgacaaatccatcttcaacaaatgttagagagaacaacaaacattcggcatccgaatgaggttgatgatgcagctgataaggttatcgttatcggcgtgatgacataatcagatgtgggggctacgactgtctcgtgactcgcttagggctaagcgcacaaagtcacctgaggtgcatccaaagcgtgtggtaagggaaatccggaactcttcgacttttcgacaatcgaccctcagcccctttggccgacaacacccctcccagtcggtacgtattcgatatcctgctatttcccctacgttgttcgtggttttcggaaatcttttattcgtggcactgcgagatccttcgtcaacgatcgcacaaaaaatcggccttctccaaacatcgaacaccgaccgaaaatatccacaaccagcaaaacaaccgttacactcgacacgaggctaacatttttttccttgctcagttgaccgtcgaacacatactccgccaacatgggtaaaggacaaccccgtggtttgaacgccgcccgcaagctccaggcgcaccgcaaggatcagcgctgggctgatgaccacttcaagaagcgtcttctcggaaccgcctacaagtcctcccccttcggtggtgcttcccacgccaagggtatcgttctcgagaaggtcggtgttgaggccaagcagcccaactccgctattcgcaagtgtgtcaaggttcagctcattaagaacggcaagaaggtcgctgctttcggtgggttatcctcttccttactgctattgttggggcctacacgagttggaattacgacaagatggaaccaccaacacaaccaccacaaacagatgctaactggcatgttcttacagtccccaatgacggttgcttgaacttcatcgatgagaacgacgaggttctgctcgccggtttcggtcgcaagggtaaggccaagggtgatattcccggtgtccgtttcaaggtcgtcaaggtctccggtgtcggtctcgccgctctgtggaaggagaagaaggagaagccccgctcttaaacaactcgacgcgttctgttcgaaatcaaaaatgcagcgaccgggagccttggagtgtgggaacggtgccggacggaaagcccgcctcatcagcgccttgatttcatgagatattttctttttggggagtcccccggcgggcttgcgtccggaatgtggtggatccgcttatttgcgaattaaacacgattgatacaacctccaaaaagattatggcgccatgactttctatcactttcccgggtttctgaccttcctgtatactgttacttggttccttgatccttgctagagttgtctggtggagacgcaaagtaaagcgtagggtatggtgttgatgtgaacacagcattcatgagtgatggtctaaatcttcaatacatttgatctgtaccaacatgtatctatcccatgctctaggccttcaagcccatttacccgttgccgaacgtcatccacccgtgaacgtgtggagttgttcaatgatggcaatggccctagtagttatatatgtgtgtaccgtcttagtgtagctgctcgtggatatatatccaacctacgtgtagtgtggccactaggattccctcggtattaatctcgaataaactacaacgttagccccgttcctacatgagtcaggttatatcgacaaagatgcacatgaaggtctacgatccctttagtcttccgggaatcaaggattggaaagcttgaaggaccgagagaaaggtgcaaaaggaaaggtatgtaaaagaatcggattgattgccacttgtatgcttgcaggtcggctttatatgtgaatatatatcaatgttaccctcatggttcgtatggtctctacatctagtccaatcatagattaagatactctacactcctaccagtattcgatcggatctatatactaggcaaagctcaatcacataacgagataagcgagagtccaacatagcggctactcataaacattcgaaatcataaaacttagttccttttattcattactcctgcgtatcgatcgtcaaagtaaaccctcgggtatcgttcgggcaaatgtccctcaaaagatcttttattgattttcacgacctgtgacacaactgcctaaaccaactacagcttagaagctgatatcttctttgcggtagtggtctgagacaatgcggtacaggtatgatggagcatggccgccgctggggtaggaaaacaaggttagctttatggaatgagataagcgtgtgggatgggtgcttgaaacttacaggttagtaatgtaaagatcgacgagctctgcgggaacgtagtcatagatggggttttggacatcgattaggtcgacgagatcaccttcctcgtatgggaggaccttgctcgggtcaccgtattcaatgagtgagtcgaagtcgaatgggtagactgggctgagcttgtaaacaccgctcacgaccacgacgggggtctggtgaaccttggcggcacgcgcgatgacacgggtgccagccgcggcgacaaggccgccgttggcgaggacggagtgtgttccgagaatgaccttgttgactcgtgacatgagagcgaagacggcagagtctgggatgaggatgacggtgatgccgtgctcgatcagtggcttctggaaagcctccaagccgatgttgtcatcgtcagtgacagcgctaccgctgacagtggcgtgtgtgtcctcatggttattcggatacgactcggcatggatgacggtaaacttgcgcttcgcggcggccttaagcaggaatttttggacagtggtcgaggatgtgtgggtgaggatgatttcgttagagtgaatgtggtccagtgcataagcggcgatctgatcgtcgacctggccgagctcatcaatgatctcgccaataccctccagcacctcagctcgtacgtctttgcttggaccgtggccagggaggcgtccgtttggagaggaggatcccggggtgctgggaagtgagtgctcgggttcgggatgggacagaaggctgaacatagaggtcagaggggggcgagaggatctttcatcggaccggaaggagggcgagtcgcgatccaaaggcaatgatggatctatgaatctatgagtcactgcgttgatatttggaccaaaacttgggacccaccgtcataagcccggggtgtttggggctgactctctgagccaatatcgctaagggcgaactcagcgtcgcgatcgtcttccgcttcgtcgcgaataagacctaggacccggcgcacgatattgcccacaaccatctcgcgcggttgcgcagccattagtcgcctacccacactctgcacccgctcaataagctttgctgaatctgttgtgcggcatgcagagataacgcttcgtagcaaataggcggttgctgtagcacatgatcgcgaatggcggatttgacgtcgcttgagcaatctgattgaaatatactatgttagcgagtttgatcgtcggtaagagtagccgtcatgacaaggagtctggaaatacgtacgaaatcagagtctcaatagaggtatcaatcgggtttgtcttgaggcacttgaggaatgaccccaggcccggcgtcagggccaacgaggaagacggcatgaggaagtgggatgttgggaggaaatctacgcggtgtcagcgggggttcggcgacaggagtatgcagtgtcgggtaatagacataccaagtttcagatccagatcacaccgagtatgtaaatagaacgatgagcaagagattctcagattctcacacgaagagccagagagtgggagagacaaagaatgattttctgccgttcgatcttgtccgcttccccacactcattgatcctcgctctattgtctcggcttcggctttcttattggtgttttgccagtttttggatttcaattatttcatttccgtttttggattgctttttgtcggctttgaaactcgtggtataaaatcagattggagttgcggaagtacttccgaggcacgggtgacttggcgcattgaggttagaacaagcttacacctccttgagatccccctctttccttcagactgccatcacatccctacacactcatctcatggaccgctttaagtggctttgatgagtaactcacgatccgtttgccaatagatcgctgcgcccctgtctcccgtgacgccttgaggaagatgaactcactgaatatcctgtcctcgcgagtcattggccaatcttccagctcttcacgccacagatcgcagtcccaaagtgatagcaaacgtgcatctccaccgtcagacctctcgaaagtccggtcttatagcgaagataattttcggtcccttgaccccactgaaaagagctacaacgatagaccgctcgtggacgaagatggagaggaggatggtacatatgactcggacgagaagaccccgttactgcatgaaccccacaagaatggcacgctcactgctcgaagtacttggcgactgatttcccaacggtttttcgatgcgatcacggaaacgatcaagttcattttgtctacgtttgctgcacccggtgtgtatttggctcaatactttcagaccgacgatggccactactcgcttcttgcacctgtccggaaattgcgacgctccccatccgaccaagccatccggtcggctaaaggggccatccgggtagaaggtcggcgtcgtagtggctccacccggaagctccgacctcaaggctctcacgaatccattgtgtcaacaacgtcagagtccgacacagatcgacggtatactaaaaatctttcaagtgggaggaaccgacctaccaagacaaaaggccgcgatgcagattcaatcccagaaggggcggagcatgagcacactccccgtcggtctatacgaatcaagctccataatgaagaatctctcaagcggcagagacaacgaagatcccagagtgcagacctaggacatccaatgcccgagggtgtctctcgtgtccaaggggctgtccacctggacagcttaaagtccccaacctctcccaacatccaccgcataacaaagtacccacactctccaactccaccgcgcccactcctcccgtcacgagtaccttcatatactgcagctccccgcaatgccagacctccgcagaagaccttggtgcttgatctcgatgagaccctgatccactcgcttgccaagggtggccggatgtccagtggtcacatggtcgaggttaaactctcgatacccacgactgcttcattgtccccgggcggaccgcaaacgacactgggccctcagcatcccattctgtactacgttcataaacgaccacactgcgatgagttcctccgcaaggtcagcaagtggtataagctcgtcatcttcacagccagtgttcaagagtatgccgaccctgtcatcgactggctcgagcaggaacgaaagtattttcaaggccgcttataccgacagcattgcacatttcgtaacggggcatacatcaaggacctgagttctgtggaaccggatctaagcaaggtgatgattttggacaatagcccgatgagttatattttccacgaaggtaatttaggtttatctatttgggtgcgcttagactaataatcatcgctagataatgcgattccgattgaaggctggatcaacgaccctacggacaacggtctgctccacttgattcccatgcttgaagctctacaatatgtgacggatatccgggctttgttggcacttcgccgcggtgaaatcgagtcatgatcgttatccacatttgtgtccatgaatgtgcgcatctaggtgtataagggggggttttttttttctagaagcgatatgcaacctttaaacctgaaaacagaaaaaaaaaagatatcacggagcaatggagggaattggagaccgaccgacatgatcatgcaagcgcagttattcataatggcatccggcgtcttgtttgactaggaatggaaatccgtacatatgaccatgaactctcctatgaatgtaacacaacacataagaggatgatgtcctaaaatcccacggaaaccgccataaccttaccccctctggtactcgtgtcatcaacaggaagcttcgtcccccctccagtagtgatataaagaacattacgatatctctgtgtccgcccaaaagccgccgatgtagcagtcatcaagtccattgagcccttcaaacccgcgatcaactcatgatatctattaggaaaggccctaataaccacatcatcaacaagacccgccaaatacccaaccccatgcaggccaatagcgaagtcatcagcaagtatatcatggctgataacctcgtaaggccccaaagcacgaccggtatgtgtatcaatttgaacacgacagaaaatatgcttcgggctgttgctgtagtacatataatcgtttactatcttcaacccgttaacctcaagcaacaaacccatgtcatgatttgcggccattgtttcgtgttggtggatcactccgtacgtgccggtgcggatatcgagacgccatataaggccgagttgggagtcggttatggcgactgcttttccttcgtttagagcagctatgccattcaaatagtcagcggggagttttgcgatgagaattggctcggcgcatttctgtggtgtttgagatcgaccgtccagactgagttggatgcaatgactgcatagatatctggtgagagctccgtgataccatctgcgtcttcggcgccgtcaaaatggtggaccaaattggctgagctggggcctgatggaattgaagggtcaatttcccagagttctgctgtgctcagtactgcgactaggaggttgccgtcgggtcggactgcgatattctcgacccaggtcccgttaggggatctgtggatttcgcggagattgggagagtgggcgaggcatagagtgtagatgaaggtaagcagtaataatatggaacctaaaagattagccatatgtggaaggtgtgacacaaggatctcaaataaccaagtatatgggaatcattgccatatataggaagtgccagtttcccatttcgcaactcgaattaggtaggtttcccggaaaccgtggccatgtatgtagttaactagttacaaagtggtgcttggtaatatgctcttggctgcattgggctcagatggtcatacagcacgattggtaatatgctcttggctaaattgctgacagcagggcgcggagtttaccaccggcactccactggcactccactgcagcctgaatcagaatagtaagtctaggtatcgagtagtcctaggcctagatataagcgtcgatatctgacatgcaaagaaacagcacgtcgcagaaggggtcgttgggtgccaagttaaagtcccagcgtggcaggctggggcttttgctgagacttctgccttgacaagaccttttccttctctctcttggtctcctttgatggagtaaaaaaatatagatgtaagaacccaaagggaaaaacgaaccgtctatcactgtctgactgtattcggattttagtttgttaatttatgctttttccgggtgcctaccgagtgggtcacaactcacaaatataattggtgggccagcctgagctgccaatagccaaaagttaaaaagtcaagtcgggacccagtcaaagtcatgacgtacaataagcagcctacatgatgctcgaacctaatagtacatagatactgagcacacctctagagtcaggcttcttggcgcctaaggctgcagtcttgggggtttgaaaattgcagatggaagagccgtggacgaataatatctatatctcaatctctcgtcattctaggcgcgaatgacaattacaacaggtgatcagcaaaggatttgtctgtagtgcgtttttggtaactaagccatgcaccacgcagaatttcaactctcctctcctgctgtgacttaagcgaccccgtttctgtaaggttacatcttactatgcacaaatccctatggtgcatctcgtttgtaccttgggtactgctggaaaattgtgctaaatttgataacacgagttaagagacgaaaagccttctccattttcttcagttgacataacgacaatgtcaattcgcaggctgtccgcgtaccaacgtcatgccagagaccaaaaattgttgcgattgaatgagaatggcacgtttcaaatatcagtttttagtgacttgcatttcgctgaaggtatgctgacagactcttaccgttgacttgagatagtaactatgtaaagatgatatagcggacaacaagaccgcaggggtcatgaaatccgttctttcttcggagaaagtgcaactcgtggtactcaatggagatttaatctctggtgaggccacccaaaagtctaactcgagtctttacgttgatcgggttgttgcacctctactcgaccgtggtataccatgggcatccacctatgggaatcatgacagcgaggtgaatcttgatccagaagagatctttcgtcaagagacaaaatatcaaaacagcctaaccgagagaagggttctggaccccgctgccggcatcacgaattattacctgccaatatttccacatgaggcttcgaatgacactatcccagtatttatcttgtggttttttgacagccaaggtggtcattatgcattgacagaggatggggatggcgaatcaaccacgagacagaattgggtagatgatacagtaagtatcaccagggctctcacatgttcccatgcttgatccaaaaagtcgaatgcttggtcaatggacttggtgtcgagctttcacatactgacttgttgcaggtcattcaatggtttataaaagccaatgcaaacctaacgtccacctacgggcgaacaatcccatctctagccttcgtccatattccagttcatgcaatgcgcgccttccaaaaatccggcgtcagcccggtcagggaaccaggaatcaacggagaaagagtccagcaacaaggctacgatgccgagtccggctaccattctcaagacttcccatttataagtgctctgttaaacaccacggggttagcagcaactttcagtggacatgaccacgataatgactggtaagaaccatactgtgctatacattctcttctcaggttgaagtcaaaacgcaaaaacgcctcatttgactaataataatccttttcataggtgcttcaagtgggatactaagctaaatggcctcaatgtgacgggaaatggcatgaacatgtgctacggccggcatacgggatatggagggtatggcgactgggcgcgtggcggaaggcaggttttgttggataagcgatcgcttggggatgatatacagacttggattcggatggaagatgggtcaatttcaggcgatgttcatctcaatgcgacgtatggccaagatcaatatgggctggtgcagaggagtttcagcgggcaaaatggtggtctttctccacacttaaatgttctctatttgtggatttgtatttactgggcttatatgcagttgaactgatggtcaatggttcggaggactctataaatctgttgagttgggggactggtcatggttggctcttaggggatatgcgagcgtgtacaatttgttggagcgacacagttcaccttgccctgaggactagcaaggcctgaaaacatcagctgggagtataatggagaaaaaagaagattgtagcaaagctgtgaaatctagaggcagctattgacgtcgggatcgaatgcttatttatcattgggtgttttgtgctgtacgaagtacatatgtatcggataatgcctgatactctcgagacctttcctttgcgttttagtgctcaccccttgccgctttttggtcactgagtaaaactgagcacgtccctgagtatcctgaccgacttgatcacaggccattacgtaatcaactgatctgctcactgagcatcacctgatcatcccgtgaatacacggcgaccttcgtgctcctccgtactgtttttggttggagagctgagtaagtgtcctttgaagtatttggcgcatattttgttgaagtcatccagaagacattttactactggctcacaatctgcagaattggttctatttttctgtggacgtctctaccgctactgtataatgaaataactatttggctggttcaatgccttggtgacattgtagcttcctaaaaaagtatctcttttctgaattgactcactcgtctccaccatcagcccccattgccgccaacatctcttccgggcccgcagctaagaacatatgatgggtcatccagtgacctttctgaattgttgccaccgcgcgcggccgcatcgcctcctcgtatgctaatgttgccgactccaggttatcgatgccatgagaaatgatgtgcctcgccagatcgacgctatcatgcatagcattgttgactccatctccagttgggactctatagacaaagaacaaaagtcagaggtaaactctttcccgtggcgatccaagaagaaaaaggcacagtttagtatgcacttacgtcaaatgtacagcatcaccaacaagtgttactcccgaaacatgattccaggacgggattgcatcctcggccatggtgtataatggccatgagcgaaacttgccatcgcatgaccgcacgaagtctgtcaggtcataatcccagcctgcgaaatattcttgcagcacggtattccatagggccgatgcactcgcgaggatggaaccttcaggtatacttttctcagaaagccttagacccacagaaacgtggtacgacccatcaccgaggtaatataggaatatttgccgctctttgccaaaggccagataatttcccttccctgcctttgaggcagccaacgggtagattgggttgtcgggcttgatataagaagaaaagaaatggataccagaatactgcggctcggagggcataacctatgacaatggtattatcagccaggaatccgacacctccactgaagccatatcgaaattggagactttactcactgtcgctcgaatcttagaccaggcgccatctgcgccaaccaccagacgaaaaccagatctagatggctggttctcgaaatgagtcgtgacagatccattgtcaactctctcaatgcgttgtaccttgtgatcccaaagaatcctagacgccggaactgagcttagaagtaggtctcgcagatcctttcgatcgatctctggctcttctgtgtctccctcgcgggaatgagaaacatggaccttcccttgagaatcgactatagtgagtggaacaccaaagcgcgcaagggattgaaatcttggaaataagccggcttcgaggagagcggcctggccagtggtagggtgaagatcgagggtaccaccgctctgatgttcattcgcccacgtggcagagacatctcgttcaaagacaacatacggtatttcagcgacctccaagagccgtgcgagagtaagacctgccgggccagcgccgacgatggcgatgggtgactgtgactgcgtcatgttatgagtgagactcgaaaacaaagaacgaaagtttcgatgaagatgcagacgagaggatgagagatgacatacttatagatttattctacgtcagttaaatgccggaacttgtgatgtcggatgttagaacacttcggaagttactgtaaggtgttgcgtttcggagtttaagtccacggctcggaggttacggacccactctaaattcactttacttattcgcgaacttccgtaacctccgactttcctaacgcccgggattatttaccttcagttacgtccgacatcaaaatggctacaagccagggcgatgaggatactgccctctccaaatatgcttgcgactcatgcagatcaagcaaggtaagctccgcgttttcacttacttccgcgatcgagagatggaaacaaactaaactacctccgcagattacttgctcccgtgaacggaatagttgcgaacgctgcacgaagagaggaattccttgtatctactcgcgtgtaggcatcattcgtcgtgctagaaaacgcaagcacgagacacagcaggctagcggtgcaatcgcaactcctcggcccgcgcctgggtctgatgatggctcggcttccaagatcctgcgaagcgacggtcgcccacagtcatatcttgcctctgatattgaattgaccgaagaaagcttaggcggttctaaaagcccgggtcagcgaggtccattcaacgcgctgctgatgctgaacgaagccagtacagccacgactgttaacaacgagccaactgtgctggacagtgcgaggtctggaaagacaacacgactttcattcaagaagcactctatagaatggtcgaaaagtatggagttcacgaaaaccgtccactgcgcatatggttccagctgctaatgatgccattagtttttgagaacgccttgcgagataaagaacctttgcttagtccggcacctcctgaagtggtacgctctctgaaagcgtctcgcccagatgagattcaagaaaaagcctggttagtgatgtactactgcattatattgagagtcaccgacgctgtacatctcaaaagccagctgcgacaagagctctgggcctcactcggaaatattagcgtcctgatgaaaccgagcgacgcgaacatccaggctattctcatggttattggtctcgtaccggacttgatagacccctcattatgctggatgctctctacaagcgcctgcaggatgttacaagccctgggtgttacccacagaaggatcgacgctcagaatcgggaacaacggcggctgagattctggcagcttaatctcgttgacaaggcgcttgctgtcatattcggtcgatctccaattttccctcagaggatgggcattgaggttggtcttccgacattggagcagatccgaccatctacgcagcaccggacgtcagatggcagtaaagggtattttgcatcgcacctcatgtatcagaaatttctgctctcaaaggttatggcagatatctggcagtgcctctacggtgaaatagagagccaagatctcgaaatagagtcggtcattgctaacctcgaatcttggtatgaacaggcacacaaggtatgtctcaatcctgcagggtttgccttcaaatgcagttaatgacactttaacccgttgcagactcttgaagctactgcgatatctgaaaagccattttgcaatgcacaaaatgccaagtcgatagacatcggtcttcgcagccaggatttccattacttttatctgaagatccttctgtttcgaaaatccccaccccggcgctcccagtgcatcactagctctaaggaattgctcaacctgcttctacatctatccccagaatcagacgagccatatcacccttttctctggcaatttctatactctccattcactgcatttttgttgttatttcgtgacattttactcaaccccggccgtgaacctaaggacaatcaagaagctctggctgctatggagaatcttccggagttcctggaaaagatggcctcgcggaatccccttgccacaaggctgagggaagtttcaagagtgctcattggccatgcggagtctgcgttgactccaagtggacaatctcgagctggatcagatggtctagtggcagaatcgactttcacatcgagtgagacagcaagttcgttcgacatggatctattgtgcaaccaaaccacagatgcggcaagaaatcctttctgtgacttaaaaacagatgatatattcgaatcactcactcaagattttgagggaaatggactatttgactggatgacttggctgggtgagacgtgatgatatcatgcggatacaatgaaggccggaagacccggcaaagatgcgctttcgcaaagatagctctatgcagaatcacggtcctggttttctttcgtggacgctaccaggtcgacggcgctcaaattgagagttcaggcctacgggaaagtggtcatcgaaccggctgtcaacttaagccatacaccggcagctaccaaaaacagactcgttccgcaaaggtcatatataacacccacttagagtaaatatggcccatgagaaagattgagtgcgctggaccctatgagagcaacagaagggcagtacagcagcgagcgtggattgagctagaccgccaggggcaacgaccccgccttcagacgcccctgtctagaacattctgttcagatttatagtatttaacagacgccttgaacctaaaacatcacaagacacaatactgccaagaagcgaccgtttcagcgtaaccaaatacagattagcgtatactcgggtacgggccgagaaacaaagtcagtatgtctaaggggtaatctgttttcgaaatcgactgtacattgcagagaggatcgactgtagcatatccgggtatcaggcttttgatcgactggacttgtataagactgtatatttggtcgattgtaaaccagattgcgagcggcactaatcgaacgaaaatgacgggacgggccgagacatgaacccctgaaccgcccgaccgcgacgttctactagaccgcctaataattatgcccaggagtaaaaactcgacattgaacaaagtaacgcgcgttcttagctgaagaagaagacctagggcaagtgggtagcctaacatgaagcggtagcctcggaatcattaacagagagcgaggacccgaacgtgttagagctgttaaaggaacttgtcaaacttaggaaggagattagatagcgagatgaatcatataaggaagagctttgaaaggtcaaagaagagtttgccgcccttaaagaacagtttaatactgcccttatagaagtttgacacaagctatagaccctagcagatagacccgcgatcccgtaaccctacctcgagctatattcttagaataaccacgataagatcctatatatgtgtaaaggtatacgttatgcaggtgtaaggcctgtcaaccgggtaagatacaaagggctttgtggagggaacacaatgtatnnnnnnnnnnnnnnnnnnnnnnnnnngcaggtgtaaggcctgtcaaccgggtaagatacaaagggctttgtggagggaacataatgtattgatgatgtgccaagactaattcttgccagtctcggggtcccctgggggtcccaaactataaggaaatctatctgcctatgttcatgtgacgaacctcctttccttagagaagaatcggaggtaaaatgttcttgtaatcggtatattctgaccttctactgatggtatagattttaaaattggattattgaattagaaaagtcacaatttccggaatgtttttattgtttagggcccattgggcccccactagcctacctcaattcaggaaatatatgtgccacaatgaagaaattgagccattgaatttaaaattgcggaattcatacctgtaaggataaagctcatcatactggttgcattgatgtagcaagcaggctggttagttgacaatttaaagacagcatattatccacgagcttatactacatcgtgcttttgatattctacctgacttgtctgtaccacatatttgtttgtggctctcattagaatatatagcgcgtggatgagcatagcatgcatgttcattttccagactatgagcgagagcaattccatgtgagggcagtagcaatgctatcaacgaactaactatcacagtataaacgacccggtgggggctaatcccttctgggtatagtctgcagtaagctgagtgcatcagtgttactcactgattggacactgggcatcactgagtaatccgggagcatccaatgagcactcactgagcacttactgagcaacagtcattctacacgtgactgaactaagcatgatcactgatctgagtccgtactgacatctactcagtgagcctgagtctgagcaccctcataaaagcggcggcagatcaaataggaaagccccacacgccagggaaaatccggtacatatagttacaatatgtatgtacctgtgccttggctgttgagagcgaaccatatagatgttacttagaaaggggtgttgtctcagtcataggtttcagtcgcatagctcaaagactacgccggagacaataatagtgattcggtagttacttttcacaaacattaactctagcctatataaatctgtaagttgtggtcgcttatttccgtttgcctcggttttgcgggggagtttacgatgactcgcatgtcaagatccttgattccttggcgagtctcaaaagacaggtgggttacgcagaaaacagtctatgtagatgaccaaacccatgtgaaacccctggttttttcgaaacacagcccattcgatcgtcaaaagaagaaaactggctctcccgcctctgacgtcagagacccctgggcggccccactctttctgccccgggtccacggttgtgaattaccaaacgtccgaaaacggaaacattctagggcgtgaagagatcgcaatcaaatgaggttgaagaacaatatctcaggctaagatatcaatcacctaccttagtagctagggactctcatacataagctggcgtgaaacatatcttgtaatatgtgcgtaaatcattgaatctgaaagccaagaagcctaggttccttggttggatccgtcgaatagcttgtcttgccctctttacacgcgttgtatggcttggcatatgcatggtgaccgagaaagtggggaattaaataagccctagcccatccgaaaacaaagaccctatattattcgacatcatctgtcgctgatctgttgctgatctgtcgctttcactcactttatcccgtaataatatgataaattgacctgctaatgcttatcctacccagccatgaactgcttagttgactgcacgcatacaaacgacatcgggctatactcggctcagccagtggcgaacgatatgatagatctgctagttgatcgtcggtgaggtctttgcgaaaccaaccagcaaaatcttgctaccccacagaaaagtggataaggccctgaatcctatttttaacatggaacttttaggctgggggtcttctgctcatacatcaattattgcgccgcatccccaacccccaacctcctttgacaagcaaggtctcgccccatttttacttcgaatcgcgagcacttctcattttagattgataccatctatgattgatctaggccgaaatgcacttgtccggaacatggtctatccttaacggtctcatcacaacactcctcttttcaacgttaacgcctgcgatcgaattagacatcagcaataaacgtacgtcacggatagtcgaagctattttccgataaaagttgttatgggactgactccgcaatcattggacagaatcaatcaaagatgccgcaagtacgagtgcttactccatgttgggatggtatgccggcaacgaaactggacaaattcctggctctttccccgaaaaatggtgggaagggtctgctctttttcttgcgttgcttcaatactggcacttcaccggtgacacgacctataactctttgacgagccaaggactggagtggcaatcgggtgataagggtgactatatgcccagcaactatagtagctacctggtgagcaccatacatcaatttcgaattctcgcgacgaataaccagttctctgactattctcgaatccctagggaaatgacgaccaaatgttctggggtctcgcagctatgatggccgccgagctgaaattccctgatgtcccgggccaattctcgtggctttcgctcgcacaaggtgtatttaatacccaaaccgctcgatgggatacaacaacatgtggtggtggcctgcgttggcagatattcccgtaccaggacggatataccatgaagaactccgtatcaaacggcggtctgttccagcttgctgcgcgcctcgcccgttacaccaatcaagccaaatactcaaaatgggccgagaagatctgggactggtctacttcctcaccgctagtgaacaacaagacctggaatgttgccgactccacgcaaatggcaaatgactgcgccgatgttggtaactaccagtggagctacaactacggtacatacctgatgggcgctgcctacatgtataactatgtgagtggaacctcgatactcgctatttacccattacatgcgcccaaatcttctatttgcagacattaacattccacctgtacagacaaatggagatgaaaagtggaagaccccagtagacggcctcctcggcaaaaccctaaaaaccttcttcccgaccggcgacatcttcgaagacacaacctgtgaacccaccaagaagtgcaatttcaacgagatcctcttcaagggcctcacctcatcatggcttgcattcaccgcactcctagtccccgatactgcagcgcagatcaaacccaaactcgcgagttccgcacaagctgccgcgaagtcctgcacgggaaacaacaacaacacgtgcggcatcacttggtatcaaaacaagtgggacgggacaactggaatggagcaagagatcagcgcaacgaatgtctttcttgcaaacatgattaactttgacaccggcacgtttgggcccgtcacttccaagactggcggaaacagcagcagtgaccctaatgcgggtgaagggaaaggaggaggggatgacgttaaggagaagcctactacgagtggggataaggccggtgccagtattctgaccttgatctttgtctttacttgggctggaggcatggtttggatgatgctgggtgcttaatttggcggtatatttatttaattggcattttttcttagaggactcggagttctgaaggggacttgataatgtttgtacataccatctcgaaatcttttactcacctaaagcaaaataggatacccacgggtggatagcgtttggaaacggaggaatgaacttgaagacctagagtatggaatagatgattatactataatacccaggcatagagaactacaaaacatcacaggaagccgaattatgtagacagatagatcgtagatttacctagatcacatcaagtccatgaatggctcacaccaacaccatatctcttctttctctagctagctcaattcatggtttcctttcccttgtgcttctgatacatacccatccccggaagctcccatcgccccgaaagacaaactttggtctctgatgagcgacgccatatcactatatcgatctccccaacacccctctattacggcaccaccagcaagaccatcaactgaagggtattgctgagatgcaaagagagcatctactcgttcttcgtagtcattcttctctgccacagatcggaatggcccaggggacttatagggccagtagccggtcatgatcgtgtagaagaccgacccgagactgaatatgtcaacagcctctgttgacacccatggtttggatggattgaaaaatcccgggtcggggagatgcccaccatctatatcaccaccatttgtcgatcctccaaagtcacatagtaggagattgagcttactcttggaatcagagtgtaatagaaaattgtccggtcgtaaatcggaatgaatgactcccttctggtggatatagtatacggcttctgctgcctggcaacaccatttcaaacgaagacataggtcaatagcatcattatgctggtcaatgtaagcttgtaggttaccatcgctagcttcgtcaaagagtaatccacgcggttcctcggaggtaccgatatagctgcaataaaaatgttattaatatgtactccgtacattagatcgcgtcgtattcggctgacataccgtactatgctagggtgtgtccctaagatatcgaaaagtcgctcttcgacctcgaaactgtgtttgatatccttgacaaaggaggtagcgtctgccgtatcggaatgccaccatgaatatctggggcatttgacaacgatacccggttttagtctcactatcaatgaagtcgaaccttgggtcaaggctttaccgacagaaggttcatagatgaccggattgcctattcgacctggcaaaatagcttgattttcttcactttctcccaaggcctggtttttggcgacagttggagaatcattttcggatatagggcgtccagaaaagaactcgtcaaccttacctgccaatccccagctgattttgtacccatttgcgccggcaccgtagcaagatatcaggggaagagggttccctggtttcaagacaaaatgaagtccaccatgtctcatagggcgccgagcaacgtagacttgtctcacatcaaacccattggtcgcagccagtccatctgcctgctcgtcaaccatctcggggcatagaattctcacccttttaagaatgacttcagtcgaagcatcgtcgatatcctcagacctaacaagtgttagcgtcactccaacctcgggaataattcaaaacataccagttattaggctctttcgtgccaccgataacagtcccaccacccagaggccggggtatgataaccgtagaggaaccatcactccaatgatgactgatagttctgtcacagtgattcgagacgatgatgaactgaccccgcgaggggaaagagtcaggatcattaaaccccctcccacttgcatcaacaacagccgaaacgtgatcaatctcatcctgggatgtattctcccgatatacagacacaacctgttctaggtccgtcaaatttgcgcgaataaagcgagtcccttgcgcctctgcgcgtgtctgtaaccacttcaaataaaccggcgagttcaggacccaactgcggtatgaaacacctagctggatagatggatattgaggggggtattgggtagggtcgagaatctggaagtccggccatgtagtgtagccattttcttctgccaggaacgaggtcgcgtcggctgtatcgaaatattcgactgcgggaataaaatccacccccgcttccgggtgatgtttcgcgatcttctcgaattcttggtaggtttgtcgcatccaggcctgttctcttcgttcctcttctgtttttgcgggggtggggcggaagtgtgcccctgcccatggggaggcgtagtcaatgccaacgtcaccgggtaactctctcgcgatgacggtgattttcaagtattgggatagtttgactgcgatgctgagaccgataacaccggctctgttgaattgcagttagtaggcagaaaaaggaaagtagacttggctctcacccgacgatgataacatggccttgactcatgttgattgttctttgtctttacggtagtccaaggtctaatgattgttttatgaatgaatctatgcaattgtccaggttcagatgttgcgaaatgagtcatctaaattcttcagggccgacacggccgcgggggcaagtcacaccgaacagtcatattgcggaatttgtggctgtcgaggggcaatcgaatcaaaccagaatggccataaaccacctagacattgttgtataagagaatttgttgtggactattttatggtaacttcggctcagcagctgtgtgacatagtttaaaaagcacacatagtagatatgagggaaaaatgtacaatgatctcctcaaagatacatcgccattgcaataaattcaatttgtgacttccacgcgttaagcgcgacgcgaaagcggtgtggatttgaatggattcgccatcgaagccccaaattcacccccgcatcgcagctcccacgtctagatatggtcgcaattacacagacagacagccagcccgacgctgtagacgaggaggcgaattatgtaaacgagactacagctctcctagggaccagcaagaccaagtatgctgacgcgcgcacgtcagacacactggacagttcgccagggccagatagcgacagtgacgacgaggaaaagcccttgcccaagttgcagattctgctactctgctatgcgcgcgtagtcgagcccctggccttcttctccatcttcccctatgtcagccaaatggtacaggacaacgggggcgtggcagacacggacgtcggcttctacagcggactcatcgagtcaatgttctccctaacgcaggctattgtcatgatattctggggccgagcagccgaccacctcggacgcaagcccgtactggtatcctccttgttcggcgtgaccgtggctacaggcctttttggtctagcaaagaccataccgcagatgatcatgtttagatgtcttgctggagtttttgctgggaccatcgtcaccatccgcacaatggtggccgagcacagcacgcccagtacgcaggcccgggcgttcagctggttcgccttcagtgggaacttgggcatcttcctggggcctttattgggcggtgcacttgctgacccagtacgacagtaccctggagttttcggaaatatcggcttcttcgaaaaatatccctacgtgctttcgagcttcgtggtggcgttgatcggggccaccgctgctgtgtctagcgcctgctttgttgaagagacgttgaagaaggagccggttgtcgtggaccgcgatggcggggaggcgacatccgatgcgctgaccgagagcggtgacctatcgacattgcagcttctcaaatccccaggggtgggtatggtcctatacacgtacggccatatcatggtcctcgccttcgcttacacggccatcattcctgtcttttggttcacccccgtaaacctcggagggtacgactttacccctctgcaaatttcattgatgatgggtctaaacggcgcctcacaggctgcatggctcctcctggtgttccctccattgcaaaggaagatagggtcgaacggagtgatacgtctctgcgctttggcttatccgctattcttcctactctgccctcttggcaacgtacttttgcgggtggacacagatggatccgttaaagccttttggattctcttgccgctcgggctggcgattggatgcggagtcagcatgagcttcacggcgatccagctcgttctgaacgacgtctcaccctcgccgagggtattaggcacgctgaacgcactggccctgactggttccagtgcgctgagggccttctgtcctgccctctttaccagcctcttcgctctgggggcgagaacacagctagctggaggccatgcgatctggatactcctgctcatgcttgcttcagggttatctgtcacagcaaaatatctaccagagccccgggccacgggcaagcaccggaacagccaggcaaggtgaggatggttcgattagctgaattcacagcacgatcaagacttcccagcgcgcacctttggaggaaagccgctttttcgcataggatctaaaatttgcaattgtctccaaaatttgtcatgctcgatgatgcctgtttatacagagaaaattcatatgtacgcattatttcttttaccgattcgtaccccgtacatacaacatattagagtatatccttttaaaaagttaaatttcgacaaagggattatttatgaaagatccaaaggaacatcagtgtgttatctaacgtcttttaactatatcatctagacctaagtcaaccggatgcagctcaccactaccagatggtggtgtttcgtctcagcttgaatataatcgcgagcaccacttttattacgcttggacctcggtactacagtctctattaaacttttggaacttcctaatcatggtctgatctagaagggtttcaatgtcactattcgatgcttgccctcgataatgaattgggaaagggacatctcattctatcggtcaagaacccatcaaattattcatccatatgttatatgtcttctgttccgcaaatccttttatgttgtttgttagctgttgtgccatgtctcggaaatctcaatggttttcttggcatcgaggaccttgagagggtagggctgggcagggcttggcgggcttggcagtcactcgcataaaggtttactgagcgatatattctccatccaatcgctttttttaattccccaattccgtcaaaatgctgcgtgaagcattttttatattcatatgcgtggcatgggcgggatttgctattcatctctcgccgtggttgaaggttagatcaatatcctggaactatactactgaggactaacgtcgtgtagggcatctcccacggagttgaagcttacaatgctactgcatttaattacccagtgccattgtctacacatgatgaagagcacacgcgtctactgcagaatcttcagcgatctagtgggaaatgggactctacccaccctcgacatcggttgttaactgccctacatggatatacccgctacaaagacaaaaacctggcggaggtgactcgatggaggaatctttacaaaaatgtcccaaagcagcagagaatagtacgatatttctttcctttcctcttgtttttttctttgcgggtgttaagtgggtttggctaactggcctagttgctcgaatcaaccatccactacacgcgtaaactcaacacaatggaacatcttcttgagacaaacaacgaactcgccagatctattgttgaccacggcctttggttctacaatatcagtcaatccgagctggacgaattcgtcgaagaaagcgagagtcagcagcggtccgctgataagactagcgtctcccagggaatgaagcattttgtgcgtgactgggcagatgagggccaagaagaacgtcaacaatcctttgggtgtatcttgaaatcgctcgcccagacaccacgggcgaacgaaagacccttgcgagtgctgttgcctggggcgggattgggaagactggcgcatgaggttgacaatcttggaggtgagtacataattttctatctggggaagtctcattggctgattggagattaggctttgaggtcaccatgaatgaatggtcaacatacatgaatctggcataccgttatgtgtccagtcgctcagcccctaacagtgaatcattccacccatatatcgactggtggtctcatcacacgacgaccgatgatctccagcgctccgttacatttccaaaccaagttattcgcccatcatctgtcttgctcatagagggagatttcactacggtattcgaagaacacacaggccaatacgacataatcgtgaccttgttttttattgataccgcacggaacctagtatcttaccttgagaccatccacagacttcttcgtcctggtggccgttgggtgaacctaggtcctttactgtatggtaccgctccatttgtacagttatcactagacgagattgtggccgtgagtgagggcgtgggattcgagtttcaggaaacagatcccacaattggaaataccacgttgcctgacttgcgagtgcgaggcttggaggtggcatatggtcgaaatgagcgcgggttgaataaaaatgcatatcaggcgcagtattgggaggctgttaagctctaggataggaatgaaacccatttcatatttgctgcgttctattacactctacaacatagcaaagtagctgtttaataccagaatatcatctgaattcaacctggttggttcaaaaacgggaggcatcatacgggatagggccagttaccaaccccctgtgttgacacacaatatctcgtgagttatccacctaatttaaccgatgaatgaattcgtttgccatatccaatatagtgatgccccttttgcctcagcccacattgactagctagcacagacagcatctcggttacaaggtttccggtgatgccgggaccatagctcagcaatatcgaccgatagtaaaggattgtcacgttaagcgaatggagtattctggactctaaatttacactaaaaacatggtatttttcctcggacaataaaagcatcaacacttggcaagctgggatcggcagggactgtatgctctgaccttccaagacggccaatgatacacccaagaaaagcaaagcgctcattaataaagcattactacccacatgcaccaccatccactggaaggccaattatatgttcaataccatgagacatcccctccgctgccaaggctatttgagaacctttggggcaccaagacttccacttgtcttggcctcgcaaaatactgctctctcggcggaatggcaggtataaagggtgcagaccctgtgcagcggatctctgaattcgcaaccttcgccatcgtcattacattgtgtacagccctcaaatcacctcgccacaatgagattctctatctttttcattgcgatgttgacttcggtcacatccgcggcctctactcaggaccccggtccatctcctactgcctcaattggctgtgagcctcacggagaccactggtttgttctaccccatcgtatgatgtctattacttgagggcacttattaacactcttctatataggcactgtgatggccctgcctcaacagccgtctcctcggccatctcctcggttacatcaacggcaagcgaggtcgaagcgagcactacttctgcggaagcttctccggcaagccccagtcctaccgagtctattggttgcgagccgcatggcgaccactggcactgtgatggaccggccgagacgtctagcacctccgctagcacctctacgggtacttccaccagtgagtcggctagtgcttccgacagtacttccgacagtgcttccgcgagtgcctccgcgagtgcctccgcgagtgcttctgccagcgctggaaatgaggacagcggtactggagcaattggagtgcaaatttccctgcttgttggattgtcgcttgttgctgctggtctgaatgtttgagtttcgatgactgtctgtgactgtctgtgtgtgtgtgtgtgtgcgagtttgttgctattgtcaaggcgaccctctcaaagtacagtgattttggaatcaatgcattacctatgtaaccctcgaatgttaaaaggatttatataagccgcgtatccctagttaactagttagttagtcatagtcaactagcgaactacctagctaaggcccttttcatggcaaaatctgcggtgattggcagttggaggtctatagggcgggagatgtcgaaattcttagtttgtcgccagatgagatttttgttagaagctaggttctacattactagataaaaaaataatgtagcgcgaaacgaacagtagctcaaggacaagaaggggaaaatgggcgaaatgttagacggtatggaacctagtagtacatcaccctacactaacagcatatcaaccatcaggattgacatattttcgagtgaatattggttcagtacattagttcattgttgtgatcaaggtgtcaggcttttctaatgctttttttttgcaacaaatgatgctacgacctcccctataacctacgcttattcgatactagtagaccatatattgtaaactagacgatacacgaccaatcaaaaatacgagtgaagcgggtcgcaactgatgacagccacagctatcaaaggagttgctacgggtagcaatgtgaattgagagaaagacaagtgaaagacttcgatggaggaatttcttttttttttgctacgtagaatattgaatacagaacgagtgtgggaagatccaggatgagtaaagtaagtatgtatagccagttcgagggtgatgtaaacaagacggaaaaggaaaggtacagctggattcccggagaaggagaacgatgaaaagaacagtcggaaaagaataaatggacttaacctccctaaggttccagccctagatcctatcctaatccagtgacccagaaaatcagaaattgaaagttggtttggttggcttgtaaaaaaaaacgagagcttcgtgagtagtaggttacatttaacaaagaacaagaccaataatccagaacaggagagggaataaatcctgcattgtacgctgcaagaggggaagagggagagagatccaggtacagtaagaggcagagtagaggtaacagcaatagactctctattcctgtccaaagccaagcgtttcctccaccgcaatagacattttgtgctcgagagcatcgtgcgtcttgtaaggagggagatcaagacggttgaagctgtgttgaaataaggttagctatgatagaccagatataaaaccaggatcggatacataccaagtatgcgacttgggcagcgcagcgggatcgccagacttctcgatggtaaaccgtctgggaccatcggatccctgcagatccttaaatccgttgacaggaatacgcgaggtaccagtagtgaactggagaagacgcgacttctgctcggcatcccaggtgcggacaatcttccagaaattctggatgacctcgtcctgctcttggtagccgcggtaatcggtgtgcttcttccagtcttcgacgtcgatgtcggcgataccaccgatgagcaactcgagttcgcgctcgtcgaagacgttgacgagatcgggtgggatgagctcgttgaagccggacataaaggcgtcgaactgctcctcgactcgcttcatgatcttccattccgtaaccaacctacgacatgattagcggggttttatcatgataaaggctgagatttgttccactcactcaatgtactgtggcttgttctcgttggtgacgggaatatcccggccaccgggtatcaaatcaatggtgcgacgctcgccaaacttctcatcgtcaaccgaaaatgtgagttccacaattccgtcaatgtcattatccctgtcatggtgttaatattgctcaaaatagaatcacgtaacaaactcacagtgtccatgccaaattccggtgcagatcctcatccacaccttccatatcttgaagactgactttcttgcgcaacatcatcttgtagaaagctccaataaagaaggaatccaggaaacgacggtggaagatagccagaccaaccactcggccgatgaacttgaaataattgagatgctcggggttcacgcccgagtggggattaatctgcaaggtataattatcgtgggcagagtactcgaagagacaatagaaaggattgaacatttcatgagagaggaggaagaagaattcactgtgagagttagcattttgactgataccggagaaaagaagaacggaacataccgcgaaagaccaccgtagtcgagaccatcttcgccatcgaacttgatcattaggcgcttcttaagatcggatgcgctctggcgcataatttcggcatatgaatcctcgaagatgttattacgacggactttaacgtggcactgtccggacataatgcgcaatgcgggttgggaccggaagtagatcagcttgcgccggaagtcacgcttgtactggggcacaccctgatccaaagaggaggggagtcgcggatcatcccatgtagttgtcttggtgttgtggtcgacgaaatatacgcgagcagtgttggtaagacgcatctcccagccgctgggaagaggacccaattgggatacgggttgctgttgaatggtggtgttgttcgcgccacctgtggtctgtccctggccgtacatgcggatgtactgctgccgacgaggatcgacccatgttgtcgtgcgcgtgttgtggtccacgaagtagggccgtccctcgggcgtcactcgtcgttcccagcctggcggaagctcccctgtgcctgcagtggtggctcccgtcgccatcatggagatcgcagcagcgttagacccggcgggggctccagttgccagagaggttcctgcgttaggcccgggtggtggtgtaggtgcctgctgggcatcaggcaggttgggtgaattggcgccggtccgatcttctggaagcattcggctctggtgggcccgacgttcgagctgcatgtttgcttcgcgctgagaacgctgggtatgctcgttatagttggccgatggtcgtgaccaggtcgtggtgcgcgtattatggtccacataatatgtccgtcccaaattgtcttcgcgccgttcgtatccggcggggagtcgaccctggctgtcctcaaaggagctgagattggcgcgagatggggcgccaggtccagggggattggttggggcgccattcgacgggggaggagcgccggctggaggaccggtggtcggagtgcgctggggcaatgatgaacttgaagctgcggcaggggtcgtatcggtattgttggggccagcctgtgattgagctgttggtgctgcaacctggggcacaaggccgctggaagtcgatgattgagcctgttgacgctgaagtccattctggttcggatgcggggcggtgaggtttgacgatagattgatgatcaattttccgtgaaccacgaggttgtcgttcgattttttcagatccctagtaagcatttctgtggggggcacatggccgtcaggtcagcccacgtttctctgactcgcgatcggcgttctgcggacgtaccatcaccacccatcgacaagtcaatgacatcgccgatgcgaacattgatgactccgaggaacccctgatccttcttcttgaatttcttctggtcgaagatttgaatcgcaagaatgctgtcctcattgactctcctgtaaatatccatggttaataaggttcaccctttcccctgacagcgggcaaatacgtacaaatcgaacggctcattccaatacggattcagagtcttcttgatcaccgaagttgtatgtgtttgctctcctccaacagtagcgacggcgaatggatcggggaatcctagaaagaggtggtcagttcaaccccgcaggactcgatcaaccgatccgaaggagacgacatacggaagacatcgcgtttgtacaagccgtcagccgcgataactatatgccagagatgttagtcttgtacggatgcggaaccccgcagagtcccacgatgattcgacggaacgacagtcttacttgtgacccggagatttggctggctataatgcatgttagcgatgatctgaagatccagattagaacagagcccgaggcgagtccaacttacgctgggagatttgacgccatgatgctttacaagcgccgatcaatcacgcccaaagaacagcgcgggcgcgcacattcacgagggggagaaggaccaaaccgagttcgcccagggtcaaagcctggaaagcgtggataggttggggatttgcaggtttggtgatgggtggtagtagtgttaagagaggagaaggaagagaaagaaagggttaggcgttaggtgcgcccggggtttgtatggcgcaggtactcggactacgtattcactatgtacgagatacccggtcagtacttcctggggctgagcacggtagatttctaacgttgaattataatctcgctatcattttactacataagcccatattgtatagccctagaaagtcatattcaattttttcccaggttaccttctaagcatacgtaatagagtaaatttagcgggtgtgggcgggtagagtggcaatttgatattaataggatggtaataaggaatatcacagctatgccagctaccccagctatcctggtaagagttacggctttttgtttaggcaaccgtatttagatgatgttcgaagttctttatatgccgccattggtactatagtatgtaccctgtacttgtaccctatataatacacaacccttctagttatacccccgtgtacattaaatacaactcccaaagccaacaatagccaaatctcatctcgtattcttttttttttttgctaattctttgcccggaaattattgtacagcacagttcccacaactccatacccacacatagagaaaatgaggagaggattcagttccggtcctgaaatcggacaccagacccgggatttccagaagcacgctcaaacaaaacacttagtagggcgagaaaccacggcctcggccccggtagggagcaccaccgcgatatccaccaccacgagggaagccacggccacgaccgcggccgaagccacgaccacggccacggtgcatcccaggcaggttggtacgcttaggcacgacctgttattcgacataagtgagtgtaaagagaataggaccaacatttataaaccgaccttcaagttgcgaccgcgaaagacactctcgttcaacaccagagcctgagcgactaggctaggttccgcaaattcaacataggcataactgcagcgccttgtcagctcatatccatatatattccagtccatctgttcagatctcaccctttgggctggccagaaaacttgtccagcaaaatggtaacccggttgatggaaccacagctctggaaatgagcctgaatttcctctggcgaagcaccgtagtcgacattgccgacgaaaatgctacgcgcatcaatatcttccttgttctcttggaggctctcggtttgctggtcgaggtcggcttgcatctcccgcagcttggcggcctcggattccatctcggccactcgtcgcttcatggcctcaatctcttcctgtagggatcaatcatgtcagcggggtatgccttgtatatgagaaaaagtatgcgacgttggtatgaaagaaatgacccaaaaatctcgaacaaagagtggaattgctttcaatgcagcggaacaaccctacctcgtcatctgcaccatcttcctggtgtggaatctgctccgccttgacctccactggaatctcctgaccttcagcagccatcttgtcggtaaaaaaagagaagtgttaagttgagggtattcgaagggtcggtgaacgcgccggtaataccgatgaggggagcaagtcagagctctccgagggtcggtataatctttacgcctcaaattttgtatatgaaaacgaagggattgagttgcttgaacttgggaacggcccaggtgatttgtacgagttagatccctctgttcaagacctctaggcggcagagaattgaagttctggggtttggcaatgagaggctttctatttcgggaatagcgcctttccgacgataaatcggcatactgccgggcggtatatacttccagcctcacttgacagggttcacttcactaaatgtcagactgggatatggccctaggccttaaatagggatctcggtttctgttatggtctagtggtaaaataagctgtatattttccacactaagtacaaacattcgccttttgaaaagtggagaaattgagtatctttgtatggcaccgcctgtacaaaagtacatcggcatgatatttcaattatctgaattcttcaccatcgactagatagaacttgaaaagaattatcaagtggaaaagttatagaccattggtgtttatggagtcctgtgtttgacatgatcttgttcctctccattgaatgttagtttaatcctagttcaagggtgcagaaattcggaccatcgagttatcatgcctatgcacatgttgcatgtgttgaaagtttgctagataagcagaaactccatggaccaggagagacgcgcgagcaagacataagagaatcacaaaacgaaatcagagcgagggattcagcccgtaagaatagatgacaatatcgtagcagattttgaggaaatgactcaattcaaggtatcatgtatcaaattgaaaaagcatgagatctgctacaagtcagaaggaaggagaagaacgtatgatcaggcgaacaccaaggcaattatgtacacggatgaggggaaaagtaggacaataggcataacttataaggacggcatcacgaagccggggggtggttcttgcggaaggagaccttctcaacagcgacattttctaccccattggcgtcggtcttcagctgatagacgtacaacacaaggacatcaccttggatctattcggagtcagcatgtacactatccttcaaatcaggcagggcaacccacgtccatgaggcagaaactcggtgtaggttcctcgtcatctggccagaagcccgagctcatagcacccgttgcgcttcccgggttgataaagaaccgaccctccatctcaaatgcctcgaagcggtgggtaccaccccacagcaggacatcgacatccatctggcgggcggcaataagcagtgcctcggcgtcggcgggtggcacgatggtgtggccatgggtgaacccaattcgtaaactgccatgggtcacgatcttagagagagcgaggttgggagaatcgacatcgtagtcacccttgaccatctgtaggtccggggctacctcgcggaggaaatcataggtctcgcgatcagtcaagttgcccagacaaagggtctggccgatcttgccaggggtcaggagtttgcgaaactagaatcgagagtcattatcagcatgctggagtagattgtgacgcaaaagacagacggaccttggctggaagatcctagacgacgtgttagcggagacagtgaagctgagctgaggacagcttacaggagctcggtcagggatgaacaggtcaccaatgaccaagaccaaacgggcggtcatcctggatggcgcgtgtggggtcaatgaagatcaatggtccatccacggtgattggaaatcggaaatcggagcaaagccagaaagaaacaacgcctgttggcttcagcctgatggagcttcgcggggaagagcaactaagcaatgccctaagccctattttatgtcctaatatggctagcgctatctgctctatgaagccatctcgatcttgattttctttcgcattggctcatcagaccgaacgtctcgtccgaaatgcttttcggtttgatgaggccaatcacatgctacacctctcttcgagggtttactcttggtggaggtcgccggaggagaatactacattggggttcgacaatcgaatagagtagcagttgccgggcagacatcggcatttggatttgatattatatagacattcaacgagagaacgagtgtagtattcgatactccaatctccaatatatgtgagtgaacagtacggagtacagcatatatactccgggatgatataaaatgacaaacatcctgcagaataccccagatattgccccatatccccaaataccctctatagaagaaatcatacggcgtgagactcagacggttggaaatctcactcggtaggatccgcccggccatcttttctccgacgtcaaaccccgaaagaaaaacagccatcttcggagacaagactcagttcatatataacccaagtctcacttcgcacgtcctcggttctatcgtccgagtcaacaaatcatcgaattctcctcggaatctcggccaatccactcggcggtgatccccgaaatccccttaccctcgggaactcctccaatcccctttcacgcgaagaaaaactaccccgcggctcgccgcaatcggaaaactggcgtccagatcgcctacggagcgtttgagcctgatttccagacacctggaccagcgtctcccattgcctgacctcaatactcccttctcgaccgaaagaaattcactatttcccgacgacatcgaatataaacccattgatcgctccattcctcctgcccctctctcatcaactcccactatgtctattcaaacccctcacaacaccctcctgatcccaggacccatcgaattcgacgatgccgtcctccagtctatgtcccactatgcgtgagtcacaatatactatgctacaatatacaaccaactaactctcccagtgagagccacgtcgcccccggcttcgtcaaggtcttcggcgagaccctaactctcgtccgcaaggtcttccaatctaccaaccccgccgcgcagcccttcatcatcgccggaagcggcacactgggctgggatcttgtctccgccaacctgatcgagcgcggggagaacgccctcgttcttaacaccggatacttcggcgactccttcggccagtgcctcgagacatatggtgctaacgtcacccaccttaaggcacccatcggcgatcgctcttcgctcgaggaagtggagcaagctctcaaggagaagtcgtacaaggtcatcaccctcacacacgtcgacacctcaaccggcgtcctttctgacgttaagggcgtggcacaattggtgcgccgcgtcagcccagaaaccctcgtggtcgtggacggcgtgtgtagtgtcggctcggaggagatcgccttcgacgagtgggatctcgatgccgtccttacagcttcgcaaaaggccatcggctgcccacccggtctcagcatcgtcatgacatctggacgcgccatccaggccgcccagtcgcgcaagaccccgcccagttcttactacgcctctatcgccaactggctccctatcatgaagaactacgagaacaacaaggcctcttacttcgctaccccacccacccagctcgtccacgccctccacaccaccctcacccagatcaccgttgatgtccccgcccgcttcgctatccacgccaaggtctcggataaggtcaaggctgctgttgccgagcttggtctgaagcaggtcgcttcccgccctgaatgccaggctcatggcatgactgccatttacttgcctgagggtctggttccggctgatgtcctgcctggactgcttaagcggggtgtcatctttgcagctggcctgcacaaggagattgctactaagtacatccggttcggccacatgggtgtcagtgtcactgatcccaagcgtggtgacattgacaatgccctgacggcgctcaaggaggctctaaccgaggccaagcaggctaagggtctgtaagggctgtactccggtagatcatgtaaataggatcactcagacttatctagagtaaaccttgtagatcacttttgggtaaaactactgcaatgaattattgattattgataatgtttgttatatctcagtttcagaaactaacttgcatagcatcatgatcctgtgattttatggaagctcatcatcgtatagaagcatcaatcttcctcttttacctaccatgatatttataattctacctacagccctgaattaacaagaagcaaaccttctaatctgcagctacccgccaatcctccacattctggaatcctccctattggcgagtctaaccaggcccaaggcactagccgaagaatgcaccagacttgtagggatggacatgaacaaccagtcacagttaggaatgtaatattgtgccaggaatcactcctcgcagtcttatattttcccttgtcagctcctacttagtatcagagaagccggaaatatgccaagaccccctgtaacacccctagacagcaatgcattgagcaaccctgtcttgaataaaaacggcggatcttcaatgtttcgcgtagcactatggtgtggatggttcctgcatcgctagccaaactagggctatactttcacatggaatctccttgtggttttcgatagggttatgcctgagatgaaggtgaaggtggtaggagtagaatgttatgtcttttatagaatgtagcagtagacttcattttatttgcatgtatcccctatatgtatcatccataaagtagcgaagcgttccaaccctgatcatatcttgatataaaatctatacaagatgcattacttgaaacccatcctcccatttattctagcagccgctactttcgcctcagcagccacaacgacagccacactagcagacaatgcgatgaatactacatgtgtatcagacaagtaagttgggtcgatctgcatacgcattccaaattgagcccagatactgactatctaaccaaatagcattctgcagcaatgcgtccaaccaatgcaatctaccttagcaaactgcgcaccggacgattggaattgccagtgtactagtagcacaaatatcctggagtaagtctcatctaacacctcgacaattcctaaaacttactctatacgccaccttcgcgcatcctaataacacattgacactaataccacctcagctgctatgataactgtcccaacgacacatcgagaaaggacgccgaatccatgcgccaacaaaactgcgctaatgctaaagcacatgtgccaacatcaatatcaacagctgcatctgctataagctctagtagagctgcggctacgaggagcactgacattgaggacgaaacggaaatttccgactctgaggccgagaatgagttcaaggaacatccgataaagcaatatagtgggttagaggctaattcgatcccccgtccagaacagggatctgcttctgttttgaggatgggtggttgcttgagttttctaggtcttgcactaagtatcattctttcgttctagtgttgtcttcaatattactgtgtgttccatatactataaataccgtcctaagcctactctcccatgcacatattgtactttatttttttcgctgacattttcttcaagtaacgcacgaactcagacccaaagaaaacgaaccagaaaccattgtaacaaactgcacagtagtaaaagaaaacaattgcccgtctcataacgcgctatgcatcatttccgaatggctgaacaacttcaatcccgtttcttgtatcttcgactgactctccggcaatccagcatagaatggtgacccagtcgtctaagttattttggataccgtccttaaagtccatgattcgcgacgaacgaatttgaagagccttggggttctgcttgccatgccagatctgaaggatacggacttgaaaatccgatactgaaaagactgtgatagggatgtatcggtggtcgttatatccatcttcgagtcggcgcttagcgatcaagccataggaaacagatacctcacccgagttaaggcgatcaataaggtgaggctgtgaatcaactatgaaggcgttgatatggggctgagacgctttcttcgcgtttgtccagcctgcgagcttccattgccattggggtgcatatacagagcccagattgttgctatatagtaaggatagttagataaaggtattatatagtataggaactcagcgacttactcttcatcaaggatataagccggcatattctcaccaaagaagttatccagagaatagtggaaggccttgaccacctggcacgcgttaagccaccgccggtattgatataactccgggatatccttgatattcaggccgtggatatcgaattcatcccaacgttgttaacgtatcacataataggcgaatggattcacaaagcgagggccatagtctaggggatcaccggaagataattctagttcagtggtagtgatatgcagattttccttgttgctgcgagagagaaggagagcgagggccttccgagtggcgttatggcaggttttaacgtaaacctgaccttcgtcccactgcgtcgtttggggctcatgctctgatgtgatgggcttcatactgtgtccgcctgtcggtcacgatagcgagtcaggcgttgaagtctgctaggttgtgctgtcggaaacaagagagtgagacagcttttatagctgatgtgataaggctagaacctgttgttggtcttcttacgtgccttgttgttgttgtgttggttgattggcgtcggttggcttgccaagctggattgaagaaaagcaactaagcccaattgagatttgacacggcagagccgccaaacggtgcttctaactagtagagttccttcgtcgctactataacctccttgagagttttaagataaccgtttttgcgaagtactattcgaaagtataggtataggtataggtatagctacgatccgggaatatttctagtaacaggtaataattactactacttaggaagagtagggcgtttcgctacaaaaaggctacacggtgaaaacgagatttctagatgtaccctttcacactgagtggaaacatctattcatatagcaataagaatgcaataatcatagtcgctgctgaacaaaagaaaaagcgaaagtaaaaataaagaaaagaaaaaagcaaatttgactcctccgtggcttgtcctccgggctgcagcatagcaataacttagaggttcttcatggcaagaattgcgtcacagacatcagctccaagcacagttccagcgtcagcgtcacgagtggaggtatcgccggagtcaaacgtcttgtcttgaacaagggattcggggagttccgatccggaaacacaacgggctagtgtaaccagcgtcgaccgattgaggtactcgccagccgagggccaaaaacgcgtggcttcaaccttccttgccacggcgtcactaactcctcggctctttgcatttaggtatgcaatgatgaagcagaagtacaaataccgttcgcgaggacggttatcggaaacgaacgtcaatggcttgttgtcaatgtcctattatatcattgatataatactcaactctagcttttgcaatactaacctttagtctcatataagatccatcaaagaaaccgatggtgtcctccttctttgattcgtccaagacaacacacctccattgagttggacttttcatcgggccgggcataggtacaatcgcgatggtacctcggtcgaaaagtagctcaatattttctgccagtgtgatgcctaatttgtatgagtcagtcatttcctttgccacaaagagaatattcttacgattgcggcggtcaccaagaactccattgctgactccgaataggtggcaaacatccttggatgtcatagatttgggtacaagatgagcagctttgatattattttggggaagtacagtgcccaacacatgacaccacccaaagccagggcgacaatgctcattgataccgtagtacgcgtagaccttcttcttgaacgcagattgatcatacttggaacctttctgttttgcacgtgcccccagcacacgggagattctagcgtcgcggtaagcatgctcgagcaggctttggtcaaccggtccttcaatcctctgacgtttcgctgaaacttgttcagcaatgtcttcgatgatcaatgggcgctgtgccttcaggacatgaatggttgataatgacgaacggaaggactctaagaaggtttgtatttcttgctgaaaggtgtcgtgggagatcttttctgtctttcttgcttcgttgaggccgtctcggacacatcgtatatactcaagttcactttccattgccgcgaatttcatgccaagaatatcggatattgtcaattcatctgacatctcagaaaggcgggatgctacacttacagacctttgcttgtaagtccgtagcgctaattgacgagagggcgccataagagacgatattctttcggggatcatgggggactcggcaggctttttcactgacggtattatgcggacaagaaaatgaagggctgatcaaactggaaagaagaggtaacaggctagtgaggtgttgggagaaatgcaatatcagtggataagctgaagaaaggtgacagactgatgaaagtgccaagctgaagtaaaagagcaactaagcctaattcgggtttgacatggcggagccgtagtcattaaagccgttactagagtagttgctcaaagcggtctctcgagcggttttcaagcggttgcttaagtagttgcttaggtagttgaagtagttgctaaagtaattgacataaagtggttgattaaacagttaataatgatcatgatatgataaaggggacttgattttattagcagtttgcataccaggaaatatgcctaattgtgaaggctgtactgaattacaaggataggggagaataagctagctagagggcagtcgcttcgctctgcaacgaggctgtcgagatccctagtatcttacagtcaaaattacaaaacacgtaaaatacagcccataccgttatcagcttcgataacagcttatacgatctccacgcaagcttcaacatccttccaaggttctatcgtctgcccagtacgaattgcctcccctcagtaatctcgctatggcgaaggaagtaattactaggacagcacgttcccagcctgataaaagccaagaccatcacaatgacagagagaatgacaacaaacaacatgaatcattccatccgcgccatatcaccctagagacattccacaacctgctatcccactacccatcaacggtagagcgagtgcacctcaacaagctgaggctgaagctgcagtcaaaggcagggaagggaccaaaacgaaaagcggggacgaaggttagcatagcgccgaccacaaagacggagctcgatccgtccgaggagaagcgtattatcgaagagagggagaagttcctccagcttgaccggtggcgctatgaagttctgccgaagattatcgcggagcgggcgagtgagggtggtcagaaagaaagcgcgccggagggagcgcacttgctcaaggaggagttaattgatatcatggaatggaagacgtgagtaacaatttgcggtattcatactacaggttctggctttgtctgacttatttctaggaaacatggtgtttcccgtcccatgctcatgggaatggtgaaaagcaaccaagtcgcaacgatcaccaagtctacatctacggcctttgccaccctcccagatgcagaccctgtaattgcgccgaatgatgcattccccaaagccagtttggacgctcttactgcgcctatccgtggcgtcggcccagctactgcatctttgattttgtctattgccacggtcttcggcgatgctaagaaacaagtgcccttttacagcgacgatgtgtatctttggctttgtctgacggatttcccagaaggtatacattgcaaagagcagaagccttctaaacacaagaagcccaatggggagttgattgtcaagtacaatatgaatgagtatcgagatctgtggaatgcctcacaggagctgcgagcacggcttaacaatggcgctggagaaagatctgtctcctttatcgatattgagagggctgcttatgtgctccgcaatatcgctgtctcggattactatgccaaccaagaacccgaggctggtctaaatattgtgaaagatattgattcggtgaataaccagctaccaaaggaatcaaagatagattctggcgagcttggcacgaggcgtagtaagaggataaagcaagaagctacgtgatgacagctgtatactattgaggattgtgcctttcatgctgttgccacttcttcccatactcctagctggagacaagatgaatatcaggagggatctcaagcaagaggaaatccaacacgcattatcccagatatgatgtctctgataaaatagccaaacggatacgatcgtctcacgccttctgtacactaagtcttttacggggtacaagcaccttcccttttcccaaccgccagtatctcttcattaaagcaacggcgggaggaacctataagaatgacaaatgaataaagagacatctgcactggacactcggaggatgttatatagtcgacatgacgcactgctgatcgacatacctatctctacctcggtcatcatgattcgtcattcatattccatagattggtatgatgaagcccaaattataatcctcgtgactctatattgatttacgaccagtagttcatcaatatcttcgatttaatctgcctaacttgctatactatagacaacctacgcgagactaccatgaactacctattccagacgtatatcgtatgcaaactatggctgctacacttcctaggcaacgacatagcaaaggaagcccggcaaagattctaatataatcttcatgatcaatatcaccttcatgacacaccacctgaagccgattcggaagtagaagagcccggcaataactagggtctacataactgaatacaggaatttagttgaccattttgtatagttattacacaggacctgactcaagaccgcttgctggttacagtattcactacggagtatagtctaagttcagaaccgcatctatgccaaaccagtcgcattttttctcagtctcattgctatgtacacagtcacggccgtcacgtcttgattaaaagcagatatgggatacaggagagacgcatgcatcacaagaaataaaagtggggtaggggtaagacagaagaaattcatcagatcatgcaatccatgcattacgggtcatcgtcaagatgaccggtttttccggtgaattgtgtttcgacatgacgcagaggggtagggagaaataagtaatggtggatggtggatagatagtcaggggacatgaagatacgtaatgtctcccgtagggagaagcgaagaagagaggagatgagagaggtcggaatggtaacggcactgtgtgaaaagtggcagtacagactggatcagggcgcgtgagatcatagcagggcattctaccccggtttttttcatgttttttcatagaacaaatagtgaaccccgtcattaccgcttggacggattaggcttgcgctcggcagcacacttggtcttggcattgtccgcggaagaattgagatagcccacatgctgatcgtcgttatcgctgaacggcacaatagatgagatcttcttagagcgactgcgcttcaagggctgggacaaaggtggcccggtttgcggcgcaggactcgcgagggaaggtcccggcttggcttcggcggcagccgatggggcagcggcgcgctcgtcgtcctcgacatggatgtggcggaactcctggtcctcctcatctgcttcggatgacgcaggactgtcggagtcggaagctgcctcgtaatcatcctcatcatcactgaccaagctgggggcctggttagcttcgatggcgttggggctcagagtttggtgatccatgtccgattcccgagactgcagagattgggatttgccagcgagcgagatgtccaggaaggactgtgggcgcgagggggtcgcatgctcgatgggcggggtgtgcgcgcggtcgagtgcctttcggctctctgactctccagcagtttgaccaacaggaatacgcatcagctggcgaccggtgcgagcaccaagggagggacggctggttcccgccgacactcctcgatagtcatccgtttccgagtcatcgtcgaaaagaccaccgagatctacaggctttcgggattcttccaccaacttgtccatgtttagaccagcaccacgtgatttcatgagagcggacagatgaggagttgcaggagaagccaaaaactgtgggtttggaggctgttggatgggctcggagcgtcggcgattggtcggttcagcagttgcgggaggagtggtaacagcagacgtggtagccgtagccggtttgcggggggtgacaaagtccttagcgggtgtacgaagagatttccagggggttgtagcaacgtgggtagagcggatgagaggatgcacgtagcccggaattgttggattggcagtgggctcagcagagccaccgacaacaatcccggcgtcgtccacctgaacagattgaccgcaagccatggcagcagcgtcgtggctggcaaagttgcggttgtgcgcgatgcggcagtgattaatgaatccctgagtgctggagaagttatcgcgccggcagtccagacagaccagcttgaccaggacaccatccgacttgcgccggatgagcatgggtcccgacttctccttgaccacagggtaaccagccgacagtgcggtatgcttggtggcagttgagcctcgctggggacgggtctttccggccagcatgcccatctcaccgggattcccgcgcgtcgaccgaccctcaaccagcgaattggctcgcatcccagagccgacttcaccaccgtcaaagcgagggtcgggaagcaaccaccgggcgtagtggcgggcgtagggaccttcggttactccccatggagcaggcgacatcggcgcgggaccatttccaggtgccagcactgacgcgcccgttcccgagctcacatctggcgagacaccggcaacatgggatccgggatacgggatttcgccacagcgtcgcagctgttccagagcgacttggcacttggcgatctcctggtcaataagacgaagctcgttgtgcttgagtaacacctccaagctcagctgggcggtgatggtttcccgaagtcgggtcacactaggtctggcgacgacggcgtcctgcgccggcggacgcgcggatgcgaccggtgagtctgacgatggggttggagtagaaggggtcggagtgatcgagtcagcgatcacggtcggagttgggcgcgtagaaatggagtcggcgcagactttcgtcctagcgggcgcatcgggcgcatcggtcgcgtcggactcggagtctgaacgtttgcgtttgagctggggcagcgacagagcgttgataccacagtttggcagcattttgacatcatccatcaccttattccctcctatagtagagggccagggaagcaagcgaaacatgccatgtgactgcatagagatggttttggattaggtggcagatggtccatgcgttccaagtttattacgggaaaggaatggacgtcgattgcgcgaccggatgttgattacggaaggcagaaaaaaaaatctattaataagagggaggagagtacaataaagagaagggggggggagaatgagaatgggagaaagaatagtggacagaggaacaattggaaaggaaagggaaaggggaagaaagggggattgcgagagagacagaataagagagaataatgggaatgggaatgggggagaggtgcctgagaggagaacggggtggagtggatgatgcgatacttgttgttcccatacaaattgtatggtcgggccatgtaccattggataatcccattggatcagtctcaaatatctgcgacacgtcatacactatttacctgaattatttatttatttacggagtacaatacggggtatacggagtatctattctattatgaatgattcaaggcattcatgtcgtcctattcacctactacctattcacagttactgtattcatccataacccataaccttttcacattcggactatgctggtacccaatataaagcactctgaccgatcctcttgcatgccaagcctataacgggtctgggccttgccctattcctgcctaagctagctgtatctacgatctggaagatccctagcaaatcagatcctacatctataaatttggccgggggcgaaccggctataaacaggttctgactgcgcctcaattgcatgtgcgaaacacaaaagtacaactcatattgcataggtcagatgtggctgagaaagcaaatggaaagtggtggaagattgtcgaaccgaagggaacaagggagaataggggcaattctagggaactctatatacaaccatcggagccattattctacgagatatattgcccctatttatagcgtcatttgctgacatccggggtatactctagccattttaaggcatatcaagatcggactcttatcaagatattccacgatcatagtacataaccctaactcgtatccgtatctcttcctgacttttaatctgcatccactcatacctttcgctcatttactgtacggagtatactttccgtcaccatcctgactatcgtagaaatgtacttggtcaaccttgcataatatatatatcgtattggttcctagcacagacaacagtacgatccctctctctaacatttccgagataactcgctgcagagtataatatatacttcatatactaagcacattcgaatctccaatatttcattcatgcactccgcattatgtggatgcgatcaacttcagaccccgaattctaatcctagcctgcagatcacttggacttatgtaccggtttgaaactcggctgttcgtgttgtaatctatcgacgttaatttacggaccacctagatactattcaagatatgtatacagataaggcatgtgaaaatcatatttaacgttgcaatcaaaatagtagcccctgcttttgcggaccatacagcgaatctgttatcgtcaattgtctactcctcgagtcactccaacacactcccagcattaacaccccttagcgccttgcacaaacaaccaacaacagccttatcgatccctaactacggtataaacctagttggctagctcgaatgctggttaggtttattctcgagcggggactttcacgggattagtattactttcagtgtgcaaatgctgggcgaatttgtgctgatgcgagggatggaaggggatgggaggttcctatgtttgttgatgagtggtctcgagaggctggtaataactatcaatgttcttgcgctccgtggtattacattctgggcacaaagttctccagtgataacaggtttactgccaaaggttaatctgaatcattgtgaaactttgctgagcgtatctagggatagacaatttctcgtgagattgacagtgtgtacatatagaatgccacgatatattcaattctagttcaatcgttcattctttttcgcttgttagacaagcacaatccccaaacgccagtgcaataaaagaagatagacgctcgactcgagcatatggacgcgaaaggcattctggcctcataagcgtaaagcaggccaacacacgccaagtgaatacataaaacagatatggttgtcgaaataaacagtgaacgaacaataatgggccaacgtgatcaatggtatagcattcagatggcgagacggagaaatcaaatctccaatccaacatcgccatccccacaagaaaagcaatagtatccactatccaggctgggcctagttcatctccccatccttaatccgcaagatgaagttaacaacgatagcggcgagcagggcaatggcgaggattgtgggaccgaatcgatcatcgataccgctctgcccgcgccgacggatactctgcgcacgccagtggaatgtcacgagggcgtagatcattgcgcccatggcgatgacggtgaagagagctgcggagatgcgaccgatgcgatcgccgaagttgagcagaccgacggctaggccgcccaggatgacggtgaagttcagccatgagaggaaggtacgctcgtttgcgaagaagactttgggctcaactcgggttgggagggcgatccgcttgcctggtgggtgttagctgggttcgggtggagattggagggttgaaaggtggttgtggtgtgggttaggatggtgcaattgttctgcttctcttgagtgtggaggttatcgtggtgtgagtcggcctccacagcccaagagaagcaaaacaattgtgcgccaggaagaatggcggtgacgggagtgtgtctaggtggaattgtctctcatgcggagctgctgagctgctgagattggaggtgttgtcggacttacccggagcggtttggaggagaggttggctagacattgtcggatgtgaagaggggaggttgttgggagaggtcggaagaagagaattattggaagaaaaatccaaactcagtcaggtacagagactggcgaaggaaaaagcaagttaaaagaagcgagaggcttcaaaagtcaagatctcgccccccccaatgttctgttccgtcctgggactagcgcatacagctctgttgcacgtgttcccacgatttgatgagaggatcaggtgactaagtatacgaaatagcgtgggtttttagttttgatcttggatattattacagaatacctgtatcattcatatatcaattggtcagatctctattaacagaaagtgcctgaattcgacacaatatatgctcttcattgatatttacaacgttggattccggaggcccgagtttcaaccctctttgccttactctcatacggcgaaggtgaatggtcaatgcaaaaataggcacggcatcaagctttagacttcatcttgatattatccgaatatcccccgaattagtagagctgacaggtaaaatgtacaaaattcagcccaacattgcatgcatctataccatatgcctgtatcgggtatcttgaaataatatccttcccgatatcgccccaattaaaatgggtcgagacctaattcaaggtctagaatatatagatccacttagtctaatatagccgctatgctggcattaattgggtgaatggtagtctaaattcgaagagatggagtgatcaaaagagattatcctcccgcatagctgttacaaagctgtgaggttatgagaagagttcaaagataatgcaatttccatgtttgggactaagtaatttagtgtgctatagttagggtttggagggataccatcaagtgaaacgaaccctacgtcatagtctccttcctagcccaatcctcgagaatcaaatccgccgccttctccgcaacagcatacacagtgctaacaatattccccgaaacattattcgcgaacacggacgcatccgcaacacgaagtccctccacgcccttcaccctcaatctgctgtccaacgcatcacccatagcaacggacccgttgatgtggtactcgcctaaaacgaggtcatacactgcttctcgggccgtatccatgtcctgcaagttcatactaaggtccggataagcgcgccgcaggaacgaggactccacgtgctttgattttgtgactttatcagcccagcgcagtaaggccgccaggagggagacgtctgctgggtggccgccgtatttggggtcgatgatagggggtttggttgggtctggaagcattagtatatgagatgattgggtactcaggggagtcgtgttctgtcactcacctgcactcccaatatggatagtccctctagatatggggtactgcagagaaaacgccatggtcaaaccagctggttgatcagccgaacgcggtgtaagcagcttgctctgatgatccatcgcatgcgggttcatggaggctggcacggtaagagccttcatattggcagagtggtcgctctcgaggtgtgcaatagtctgtgcaagttgtttcgcgtggaatgcgctggtcggtttgatatcgcgaatactctggatgatctctcccagctccgtctctgagagtattctctttgccgggaaaaagccctgcatggtgctgacagagctaagtggcccgccatttgcttcgacatactgcttactagcagcttccattgcctcgggcacttgatacaaggtatcccgtgtgactattccgggctggacatccattacagaaaacgtgagggggtggtctaggacgtttgcaccgacccctttgttagcgaccttgcactcgacgccggcggctttgagaatctctgggtcaccgatccccgatagctcaaggatctgggggctttgcaatgtcccaccgctgacgattacttcacgtcgcgtggagacctggtactcgactccatcgtgtgtgaagcttacgccggtagctttgttgccgtctagtacgacgcgattgacgagggccgagcagacgattttgaggtttggccgagcggtgcggatggcttcatagtatcctcgtgcggagtaactgcgcttgcctttattcgggccggttcgatcgactgcaccgagggtgtggtagaagccgatgtggtcaccactccatgcgtcagtgggcttgcttgatatgccggttacatcctcgcaggctttgatgatgtcgttctccaccggcaggattgaatcattgaagctggtgcgaatgggcccgctcgtgccgtggaactcgcctacaagtggcattgtggaccgatcggtgatggatgggtcgattggctcgagggtctgttcattttgttggtctttccattggaaagaattagattggaaagtctaaatgctgagatcgtacctgatgctttcgcatatactgctgcatatgcttcgcggaccatccatcatcccctaccagctccgcccagtcgtcgtagtcttgtgtcgatcctcgcacgtagatcatataattcatgccgctggatccaccgaggagctttccccgcggcatatgttgagacacgccacgattgccttcctataccccccaggaaatgaattagcgacctgaagcagaagtatgcaatgggagtacctacctgcggcaccgtatacatgcaccaatcatactcgggattctcgaacatctgcgggaaggccgcaggagtatcaactattggatctccaatgcgatacttgcccgcctcaatgacaccgacggttacatccgggttttcgctgaggcgcgctgcgagagcgagtcctgcagttccgccgccgcagatcacatagtcgaacgtggtgctggtgaactcctcgactgtgcaaattggattctcggccattgtatgattgttgatttagactggaagagtgtaattggggagacccacaagttaagtaagcacagaagggatagtaacctcaggtaggacgagctgcgggggttagtaaatacttaccgatagttatgccaatagagtttaaaacataccgaaagcggaaatatatggcatccatctacttcacgaaggttgtcccttggtcaagatcaccgccgctgacgttcatgttcgttggcggcaattctcagtctcaaaaagatagaaatcgtgtttttatatgaatgtaaatcgcttcaaaaaatgctatatgtacaatgtgttagtctcaagtgacccgactgacccggccatgatgtttggatgacgcagtcaccactccaatactcaaagctccatcttccgctgcacccaagcaagagctctctcccacctcgcatccacacaccttagagcatcaaacaactccgaaaccagcgctctacctgaatcccgcgcccaccatcgctgcccatcaagctccctcagcaacaccccccaatacataagaatcagcaacgaaaatggctgccgacaccggagactatcaacaaattctttctcaacagccgcaagccaagcgagaaccggcgccggatccgccgagcgcgcaaacttggcataacaatgcctcaaatgcgcaataactttcttattaataagatgctgccccgagtaaattccaatcataacttgatcattcaattccgatagatgtgtcagcgcagcttctgcatcggtgtcaagttcagcaggcgtgtttttccaaaattcgccctgcgagaataactctagcttaatccacgacttggtgacttgaatgatcttcttcacgccctgcagcagctcgaacagtatcacaatgttttctgtgatactggcgcactcgtctttcgtgacggttagtcggggtgacgcaatgctgatcgcgatcatgacgatcgagtgcgcgaataccgcgtcgcagttctgcggcgtgatattatcgatcgcgttgcggaatggagtcaaactacggttgtagtactgcagtcctgtctcgtagtacaggagtgctaattctggtggttcgcatgttgttgcgatgtgcattgaggctagcgccaagatcccgctcatcagatatccatgtttgaacgcgagtgttgggatggttatttgccagatttttatttccgagtcgctgatacagaggctttcgtacgtctctgttgcgaacttgtgcattagttctaggttgtcgattccgaatgagtttgtctgggctggtgccgggactggtattgctgtgggaacggctcgaccaggcaccgctgtgggcgagccgtggccatctagaggccgaggtacgtcggatgttgaactgggtggggtaagatgggctgtagcgcgacgggcagcggcgactttcaaatatgtgcattttaactcgcgggttgtgcaattcgagcatggtggaccctgctcgtcacatttgacccgcctgtttctgcattgatcgcacccgttgcgggattttgtgtgcgcgcgtagagggggcatgttcaaatttaattgacatggtgcggagaccaatcatgaagatgcctgtgaataaatgcgaggaggaaattatccgaggtagacatgttcccccgtatcatgtgactcgggttctacaccagttttggaagtttgtggcgggttggatatcgcctttcatatgatgtgtacggtattctcggtcacaatggccaaaatcggcagagcattatattatgggcatagtgtatatccttattggaataatcttggaatacatctgaaggctcagatgtcattgcacaagatactattattattagaactgaacataaaatcaacatcaacatccccgtccaaatgagttaggaagaatttcaagtgcaccgtactcaaataagacccacaacagcaaagataccaacaacaacaccagcaatgctaccggacattttctgggcagcaccagtgaaaataggagaagcagaagcagaagcagaagcggtagcggaagagctaccccaggagccactcatagacttcgaaggagtaggcatagtcttgccacccatacccatagcagccataccacttggggtacccattgcagtcttctttccaacctatcaatacaagcaacatcagccctgcaaacaagggacgaggaatgaccgaacaaaaaaagtcaaacgcagaaggtaatctaatttacctcgacgatagcaggaccagcaagaatattgtcatcagtggcctgcttgttgccctgagtgaggacgacatagctctgtccggcaacacccttgggaacagtgacggtgaactttccattacccatggacttgagaggagcccagactggaccggtgacggtgatgaaggcggcattcacgtcactagcactcgcgttgaagccgctaccagccatcaggtgcacttgcgagcctgtcatgacggcgttcatcgagctcatcatgagcgaggggaaggccttcacgggaagcgctccgttgctggagggacacgagacaatgaagggggaggcgacggtgtacacctcattgaagtcgagggggttgtcgaaggcctgggcgaaggggacttcaccgagcgcggcgcgcaggtatgcgctgtgtcgggcctcggtggtgaggatgctgccagcggctgtcaagtaggtgtcgctcatgatggaggctgcggctccgaggtaggcgctgactccgacgcctggggaggttattagtggtgattcttagtgtgattggatatattcttaccctcaagaacactggcaagggctaggaagctgttgacgtcggtggatgggaagttgtaggtgcagcgggcaacaggagaggcgccggcagctagaaaatgttagtatactggtctttctttcgcggtctaaatgacaggaacatacccttgagtgcggaggtcaagaaatcaacgtgctgcttctcatcggaagcaacctccttcaggttggcatagaaagggtccttcatgccggccttgatgaagtccttctgggtgtagttcttgagaccctcctcgtagaaagtggcctcgagatgctcaagggtaagcgcatagttgagcacgtcggctaaagaagaagcacattagacaagtcatgcattggttgggaagtgacataccgtcgctaatagcacgcgtcgagacagggccggcgttggcaagacccatagcggcaccggtgagggcaagattggtgaacttcattctgtagaatagtagagcttcggttatatcttggattgggagtctggatctaaatgaaggatgataaatctatttccaagtagagggacatgtcttttatagctgccctgccggtaatttgggggtccgatgaatggacgcctgctttgagctcgggcattagaattgcctggctgagcagaaactagtcattcttttccttgttttgtggctcatattgctgacatcccaggcgcaagactgagatcggcggtaggggtttcagatcgagacagaaagggttaacggaagactcggatgggatgtcaacaataactccgacagtaactagaggaagacccatgctccacgcgatatcatctgcaggaaccactgtggatcaagccggggcagcttgtagggaagttttcccaggtcgatcatgctcaaagcggaatataatgccatagctttgcatggtggagaactttactgagttctggggctttcagctgcaggaaccctggcggggtcagaagcgagagcgagagcgaaattgaatacgcaacgagagagcacattaatagtagcaccgagagcgaaagcgggaacgagaccgagattgaagcgggagcgagaccgaaactatgtgtactgctctaacaggttttattcctaacttttgagatatccctttttcttttggagttgaacgggaataggtgacttcccatacgacctttgtcaccggcgacataatactttattaatctgatatattcagcgtgagattatagtagggattttacatgtaagaatacctcctctaagtgagtaggtagcgtatatagtacatccacctataacgcttaatagatactatgtacctactacaagctattatgaggacctagttaagcctactgtcttaattatgggactttgccgttgcggcatatgcttagacttcaattcactcgttcgttcgcccagtattcttatcaaccgttattcaccttttcagacgtctgacttggtgatctgccattaacggccttctccccatctgcaggggggagtggcgtctggtctatcgacgcaaaattggaccgcgctcggatattcgccccgtatttatagaaaacaaaaggtatgagcatcaacagcaccgccaatgctccgatgagcgatccagccccacccacaccgagcgcgtcgaacatgtactgcgtgaatagtggggatgccgcggcacagacggaccgcaggacggtatttgctgcgacggcggatgcggcatacatcaggtacgagtcgatgatatagttaatggagacgacaaagatgaggaggattgacgttgcgaggaaagttcctgccacagttggcacggcccagtgaactgagttgtattccgccgtccaagcgaaccaaaatatcgtcactgcgaacataaccccgccaaccatggcgccgggaaggcgatcttctggaactgatttgtagcttttggtgagcttcctttggtatatttggctgttgataaacatcgccaggccgccgagacacgctccgatgactgtgccgatcaatggcagctcgccgacgccggtgttccaaccgcgcttttgctggaagacaatagggtagatgctaaacagcatatacaacagattatagacaacggcaaagtaaatggcgacggagaagctgatcgggtcaatgagaagtctccaaggcctcgtcaaggctactgtgaaaatgcctcccagggaacgatctaatgtctcgactggagccttgacgttctccttgccgggtatcttccggaggcgacgagccttgttgcgcagagccatcattggaagggtctccagtagagtgatgagcaggagctcggtggcacctgccatttagagtaggacatagaaggtccaacgccatgtctccttcagttgaatgaatccactgactactggctcaagagcaggtcctacaaatgtcatcgtcgcaaataggatcatggcgttgccacgcacgacgggtccccatatgtccgcgaggatcccgggtgcattcgttagggcggcactgacggctgtgccagtcaggaaacggccgaccaagagcccggcaaaattaggcgtagaagcccagagaaacccaaaggcaaaggcaaagtaaatggtgaatgagatgtagaagatccagcgacggccgtagaactcggataaaggcgcccaaaatagcggacaggcgcagtagccaaggaggaagagggttgtaacgagtccagcagcctcggtagagacatggaggtcattgctaataccccgaaaagctccggatggtgcagaggaggagaaagtggcattcataacgagggagatagcgacggtggtgatatagcacttccgtacgaacgggtagttttttgggttttcagggtcatttggtgaaaaatcgaggtggccatccttgtcaaagaatagttcctcgtccgaccctaccatgggtcctgaggtagacattaggaagttgtgcctgataaaattcattgctcgtactggtgaaagagcgtgacagtccgtcttgacataaactataaagcagcccgctagaatcatttctaatcgaaagctttaattggatttccaatctatactataagccttccgggaaaacataatcactgtatctggtaattctgccttttcttccggtgctgatatggggcggatgcacgaatccggtaatttcttggcttagttccgggacactatatacagggctagacaaatcaacctcccattaccaatcttaattccgatgacaaattgacataatgtttatagaattcgtttatttcaccctctcatgccgtaagtacaaagttagctcatgtcatgacctctgtcgtctttcactcaactcttcaagctttaccaaagcatccatcaacatcatccagcctcgcaactatagcaatggcaactccaatcgtcacaatgagcttcagtgaagcagcccagaaaagccgcactatccgagctcttgaatcaaagacgacggtccccgacagcactattgtcgggctggccgaggccgccatgttgaccgtcccatcggcctttgataaccagtcggcccggctgacagttttgtttggagacgaccacagaaagctctggtccatcaccgccgatgcgctgctggcgaggattggcgagaagcgctggaatgagggcaccagggaccgcatcgtcaactttgccaacgcctacgggaccatcctgttctgggacgaccagtcgtgcgcggccgcgatgaaggagcacgctccggacatatacaaggacaagacagacgagtgggtgcagcagagcaatggtatacaccagtattacctgtggaccgcctttgatgccctcggactgggtgtcaacctgcagcactacaaccccatcatcgactccgaggcgcagaaggcgtggagcgtcccatcagactggaagctaaaggcacagatggtgtttggcgtccccaaagacggtagcacgctgggggagaaactacagaagcttcccttggagtagaggctgcaggtgtttggagcgaatgcgtgattgacacagaagtggaataatcggtcgcttatattctatacatactcaatgatatagcttgcaatctgaatatcgaattgatttataatgatattacagacgatatgattacgattctaccacaattctactacgatatttttttgatatatttttttgatgccttgttaggataatcagtcgcaacccgtagaatgagccgaaaggtacaattcccgcataacgagggcttgatatataatatctagatcgctagaagtgcttgtttagttacctctactaagttggaaaatccgtagatggccaaatctttgctgggaataaaaacccgactgttgccactcggtcatgtgaccgggccttccttagtgtagctcgcagactagcttaatcaatcatctcttaccatccacactagttgtaccaacttggtagcatgtcttgagatccacctcagcgggatcccctgagctagaaattttcttttctagtaaaatagtcatcggagaccctctgcaaagaggccagtcccccagattccccgacaaagccagccatcactggcaaaatcatcagtttcatcagagcggatggacaaacagctccacagagccatcctcctcgctgtacagctcgataactacatccagctcgaccaaccttgtgctgacgaatttgactctgacacgaagtcaaggatcagcttcctactgagtccccactttaaccgtcccacactacctaaagcagaagatccgtacccacctgactggtcgattcaccgaccaagcctccataaggcgactgtcgaatttattaggcttnnnnnnnnnnnnnnnnnnnnnnnnnnnnnnnnnnnnnnnnnnnnnnnnnnnnnnnnnnnnnnnnnnnnnnnnnnnnnnnnnnnnnnnnnnnnnnnnnnnnnaccatcccacactacccaaagcagaagatccgtacccacctgactggtcgattcaccgaccaagcctccataaggcgactgtcgaattcattaggctttcccctttcatctctccaccgatacagccaagccaagctgagccacccaggccactaggaaggaaagccacacgtatacgcagacagaaaagccgtacaccgactcccgaaggacctactacccagactctggaagaaaccacccagccatctgtagaaccaacagatctggaactggaggagttttctcggagtccgactggcgtccagcctgtcccacatgttacaagggagataaccggcactggcacaatcatccagcccgacccgcctattgctgttccgcaagacagcagtagcttgtcgtcaacaagtcaaagctacatcaaccctataaccccactgtcggacacgatacagcctcacgcaagacaacccaggagattcatccagagaacctgttcggtccaacgaccagcattgcaacgaacacaacccgaacaacaacgaacacaacccgaacaacaacgaacacaacccgaacaagtcgtaatcggaaataacaatatggctggaggcgaaggaaactcagcggcccccggaggcttcacgctggaacagagggaggttatggttcagatgatccaacaagcagttactcaatcacttccccaagcaatatccggcgccctatccaccattcctcttaggcaacctggaccccctggaccaccaggaccaccagggcctgacggtcagctagcgcaccccgacacaacgtggaaaatcgcggaaattggttgtttcgatccagacaacaaagccacaacagcaattcggtcagtgaaccacatcaaccattataccaacgtctactcttgggtggaccacatgcgagacatcgccaagctgaaatccgaagacgttgtccgctcgcatatgagctactccctgaagaacaaagccaccaactggtatgacgcagaattgaccagcctggagaaggaagccctacgtgtacttccccttgaggacggatggtacaaagagttgatcaaacggtggaagccacctctcgccgaagctttacggaaaatggatttcaccacgtacagctggacagatgtccgagctggaaaagagccaagggaatacgctcaagagatcgtgcggcacgcccgagctgcaggccgtactgatctttatgaacaactattgaagatacgagaaaacatcgagccgtcccttcgagctgttgtcatgaacccaaccacgtcaaccacgctggctgaattcctagaacacctagacgtcaaattcttggattggcaggaccaagtccagttgagagatcgacgcctacaaacccgtaggtcgcagcccccaccgaggaatccaaggacccagaacccaaggatccaagaaggcccccaggctccaggccgcccccaaaatacccagttctggacttcacaccgcttccaagctaacaacccgcagtctggtcttaatacatacaatcagcagcgcccacagaaccgtcagagttggcaagcccaaccaaggtggcagaaccagcaacgcgggaactggcagcaaacccaagctcgcgaccaaggaaacctagccagaccggaacagcgccagttgcccgctctacagcagggtcaacccggaactgaacaaagacaacttagaatctcagaccggccgtattatcaaaacgaggaagcaaatgcgaaccaagtccgaagacaaacctggaaccaacgaaggccaaccgcatacgtaactgacctcgaggaccaagctgaccaagaactcgatcaaggtgaatactgccaaggcgacggctacgatgactcggatgactttgaggcgtactacggggaaccgtacctcgacgagccatatcaagaaccgccacaccaggaacagcctgggaatgaagactcaggaccagctacggcacagctttgtcatcctcaattctctgtgacttgcttgaattgtgatgtcagttttgaatcgggaaataccctccacaaacaccttgacagctgcaagcccccggcagcagggaccactgaagaagtagcaccggctttcttcgcaaacggcaccttgccattgtacgaatccgaccgtgccaaaactcacgatcctggatacgcatttcgtacttggaggtacgcaacagctacaatagcgttgggttcccgcaatcagtgcatcacagcttgtctggactccggatgcgtcatgaccctcattgattccgacatagcgaagaaactggatatcccaatttccaagttgtctaagccaatctcagtcagtggcatcggatcacagcacacatcggaggagtggataaagcttgacatttacttcatgggaccagttgcgacagccaaactgacgatcgaggctcaccttgtacaagaccttaaagccagactcctcatcggcatggacgtcctaggacccgaagggatctctatgaacttcgatcaaaggacagcacgaattgcctcctgcaaagacatggaattcggtatcagtatccagtcaaagccaaacaaaatggagccaaaaccagtctattcagcagacaagatcacaatccctccccacactatggttaacgttccaatcagaataagatccaagctaccggaggggcgtgacttcatcttccaaccggacgagaaacaagggacaatgtacacccatatggtgaattccaacttcgtattcgtcccagtcaccaaccaaacatctgtcgcacgaaccatcccacgccgagttcggataggcacaattatggagaacgacgatcccacaggatatatggtgcacccagctgaagcagctttagcggccacaccagataaccaagcacaaccgaagagtaacctgaggcccaaaaacagcaaagaaaccacgctacctaatgggatcacggtatacggcgacgaagccacagcgaacgcactcaaggaagtgctcctcaagtacaatgtttggtcaaaccccgaggtcgtggacattccccccgacagatggatgaggatcccgatgctagagggctgggagaaaagggtaaagagaaagagagtctacccgactggagaagcagagaaggaattaatcgacaaagtattcaacaagctccaagccgaaggtaagctcaaatgggctaccgatcatactccgactggatacccggtatttgtcacatatcgggatgtgatcagagatggagtccgtacccgcgtcggacgcccagtggtcgacctgcgagacgcaaacaaggaagctgtgaaggacatgtaccccgtgcctactcaagatgacatattgatactttgctatggaaagctgtttattacagtctttgacgctgctgcttggttttaccaatggcgggtccatatggacgatgtgggaaagctcggcgtgatcacccacagaggtcacgaaatattcctggtgactatgatgggccattgcaattcagtggcctacgttcagcgggaattagatcatttgcttcggaagatccggaaattctgcagggcctacattgatgatctcgttgtagcctcggacagcttggccgaacatatctcccacctccacgagctcctcagcattctccaggaatacaacatccgcctggaaccgaagaaatcattcgtcggtttcccgagtgtcaacctactcggccaaagggtcgactcgctaggaatgacaacgatggaggagaagctgcgcgctgtgcttagcctggactttccccgtacgctgaaggagctggagacctacctgggcctagcaggatacttccgtaccaaaatatggagacacgcacagatcgtcaaagccatgcaggacaggaagacgaacctactcaaggcaggaccaacgaaaggaccacagaggagagccttctcgataagaacgctgttcgagaaccctacaggtgccgaaagggccagctttgacaatctccaggctgcaatgcgacacgctcttgttcatatgacagtgttttttgaccacacaagacagctttatgcggaaattgacagctcaaaggatgaaggacacagcgcaatgatcttccacgttaagaaagactgggtccatactgatatgaaaaagccacctccagcaaatgtggttgaaccgataatgttcctgagccgacaactgtcccaagccgagcggaattactggccaactgaactggaggtcgcgtgtctagtctgggtgctacagaagaccagacatctgcttctcgcaatcccagccagtctcccagcaatcgtgtataccgatcacagcgctacggtcaatatctcagtgaacacaaatctacggtccgcggcgacagaaaaccagaatctccgactagtaagagcagcccaattcatccagacgttcaacttgaaggtctatcacagatccggagcgacgaacaaggttgcggacgctctctcgagactccggagcaacatgccgacgaagcctaaggaggacacggatctggacaactttacgcaaggaattgacgctttcccagcgactccggtaactggcgcagtagcacaagaaagccccagaatacacagaagagtctttacggaactctcggacgaaataaaagagacaattctttcaggataccagaccgacacccgatggcatagagtcatccaaaccttgcgaggggaggaagcctcggcggaccctgtgccaaccaagctgccgtacaggttggactgcaacggattactgtacttgacgtataatgacggagctgaagcactctgcctcccaaagtcaatgacgaaagacatcttctcactgattcacgacaaccaagctcaccaaggctacgaccgctgctggcaacgattgaaagggatctgcttctacaagggggcaaagctattgagagaatacatcaagagatgccccatatgccttgagcacagaacaccgaggcacagaccgtacggtttgctccagccaatcctatcgccacccattccatatcatactttgactatggactttatcgtcgcgctgcctgctaccccagaaggatttgacgctttgttagcaatgaccgacaaattctcaaagcagaacggctttgttccaggaaaaacgacctgggaaggagccgactgggccgaagcagtagttaccttttggtggactgcagattggggcttcccggccgaaatcatatccgacagagacccgaaattcattcaaggtctatggaaaggcattttcatgctattgcgtgttgaattgttctataccacagcttaccacccccaagccgatggccaatcagagagaacgaaccaaaccatcgagataacgattcgacactggtgcgcacaacaagctctccaagccggcccggacgacgagaaaccgaccagcaattgggccaaagccctaccattcttacaagctacgcttaactcttccgctaatgcctccaccggctactcgccgcacaagctcatgtatggcgtggagctgaagcaaccactagacatgatgcggcaagccttcgcaaccagccaagattttacagctagactggacgccgaacacagcttggcctatgcggccatggcgatgaagaattactacgacaagtcccacattcggaagtggtacagcccaggcgattttgtctatctgcgactcggacacggatacgacatcaaggccaaccagggactgccgaggaaactggcccaacgattcgtgggcaaattcaaagtcttacaacgagttggatctctagcgtacaaactcgatctcccgagctcctggaagattcacccagtgattagcgttgagcacctagagccagacccacccggtgaagatctctgggaaagaactcccgagccagcccagttgccagaaataggaccccaagccgtacaggcagtcatcagtaagcggactcggaacgtcggacgcccaagagcagacggtactagagctcagagaaccgaatacctcgtcagattcgtgggccgtggagctgctgacgatcaatggatttcggcttcagagctgggctacgctagctggttcgaacaatacgaccagcggggcagtcgcaactaatcccaactcagaaaaccaatcacttttatatttaattgcattccttacactatcaaccaagcttatgcaacgagcaaacaactcttacagctctcactttaccttcacttgatcctcacccgcttactttccccgagaccatctatactcacccatccttctaaatcttccttttttctcattcctctttgtgcatccctctaagtcttcttccctttcttattcctctttatgcaactccttcatctgaacaacacgcactacaacatgcctgctaaacgcaaggttccatcggccaacgatgattcgccagtcggcaagagaacggcgccgaagccgggttcaagggcctacgctaaacagctattgaaccttatgaccgaaactgacatggcttgcaccgtcgcagatgaagaaaagtacgcccaagtgatggaatggtcgcagagagaaaccaacaagagactcgacgccgaaaccaactacgctgaacgtgcactatggacccctggcgaagaacccccgactgactttggcaaagtcctgaccgcagctgagatggcagaagcaccgctttgtatcgagaaccagatcgaccaaaacggtgaatgggttccgccaccacgcggtgtgaagctgagcgacgaaggtgtatatctggccgccaaaaatatgactgctgtggagcgcggacaaagattcccagtcgacttcgataagaacgggcatgtccgagccacacgcatcccagaagacccagcaccactcggttgggcccatggcttacctatgataatggtggcacgagggataatcccactcgttggacgagagcatgccacaaagctgggcaacctcaccctgaaaaccgacgccaatatcaaaaattccccagctttcacagtcggcccagtggtcgcatcgaaatcctttgtcgaaatgagcagatcgatccagcgccaatatgtcacccataagcccgaccgggagtacaaaatggagtacaacgtggataccgcagttgacatggtctccaacgaccaccaggacatggcaatcctcctaggtgactctcacactggcgctccaagccgtctggtacgcctagttgatttcgacgggtatcagatcgagcgcgcggacaagacaaagaacaataacgcttacgttgttccccgcactttcttcaagaagtacggtattcccgggtacgacgacgcaaaacacagactttacgaaaactgcaaagaccccttgccgaaacccgaaggcagccagtctatatcaagctcgtccacatcctcgcatacactcgttccggaacaacctgaagaagcaaagcctaccgaggagaccgatatcacattgattatcaagctcaacgccatcgaacaacttgactccgaaggggctcaggtagcgaaaaacatccaccagttaggccatcagaaacaggaatacatagcttggtacaccgacgacgcgacgacccagtacgaggaatacaaagactggataaatgggtacaataaagcccataccgctgagaaggaacgtgagatcttagccagggaacttgctgcccaggttcagtctgtcaaaatggatttctctggggaggttttgaaatctctgctcctccactacgtcccaaacctcgacaccctgacgcaggaggaagcacagcaggattgaccttgcactcggatttccttttacaccaattttaatatccatttttacaagagccctcggggcgagggcttcttcggaaggggcgcctgttgccacttggtcatgtgaccgggccttccttagtgtagctcgcagactagcttaatcaatcatctcttaccatccacactagttgtaccaacttggtagcatgtcttgagatccacctcagcgggatcccctgagctagaaattttcttttctagtaaaatagtcatcggagaccctctgcaaagaggccagtcccccagattccccgacaaagccagccatcacccaccgaccccacaatttgctgctgaaagggttcattggccgagatcgacggggttaacatccatggatgcacaaacggaccgaagctgtggcggacgggcgcttatcttaaagctaacacccatggcatacctgcagggccctctaacttaatatctcccaacttcctctatgtttcacagattctctgccgcacctgcaaaggcagacagccaaaatcaaggctcaagatcggctcggccagaaacaagactagcgacacaaactctaggcctagcctcgaacacacagtccgtcccctggctaagagaaaaaaggccgctagagcatgtgaccgctgccgcctacatcgcatcaagtgcgatgagcagaagctgtgtacacagtgcgtcggcattaaggcaaagtgcatcgtgtcctatgccacatcacgcttgtctcgggccaacaatgacggtgcgagatctgaatcgccggccgtactccctccaaggtcgtcatcaccctagcctacttatgctgcacgtcgcaacgatagggccagcacaagcagctccatcgccaacaccagcccaactgtccctccttctggcataaacatggaccaggagaattcattggcgacagaatttccggataacgccacaaaggaatttttcaatcttgctcatatccaaggcttctttcccaaggggcagagctctgaacttggaggttgtctcttcccccagctcccatgtcccagcgttccattgggggaacgccctttcgcttcgaatgtgcttctcaaaagctagcgtagctactatctccggcttttctgggaagtttgccacccgcttctgccgatcatgagcaagattgaattcgccgagcttgagaccctgccgccaccgaccatgtatgatgagtattcggtaactagcgccctggtcgattctatgatcgctctgggagtacagaatagccatgtcactggccttgctgggcgtatattgggtctccagcagtcatcctaccccgcagccctcccaccggaagctgcttggcccggttttgaatatttccaccgctcccgtcagtgtatgagggcaacacagatgagacattggaggccctgaaatgtcaagttctcatggtcctctacctcttgaaggggaacgctttccgtgacgcatacaacctgcttggcatcactgtccgcaaggcctacatttctaaactccattgaccgcaaccaagtaatctccccgagattgaaaggacttctcgcctgcagctgtggtggatgctcttttccctgaatctccagtgctcgctgcagctcgacatgcccccggctagccaaaagagcctcgccaaatgcccttttcctgacgaggacgctctggcccgctatgtttcctcgccacacgaggatggcttgaacgcttacatgtactcgacccatttagttaagttctccatgattgtagctgacattggcgtatgcgcctcaatcgcggacctcgtcgacgacgacggcaatagcccggccgctctcgaaaatcacgcccttaacctctcatctgctccccgaaatcttgaggtctggcgcgaccagctaccttcagagctactcctgagccggtatgggaacagctccggcaatagtgagatgctcgattttgatcgtaccttgactctgccaaacaggctgcaccggcaagcggtgctcttggagcttcattatcacaacgcgtatacgctgctccagcgccccttcacgcgtctacactacgcccacaccagcagcatgatcacctcacccaactcccggcagccgggcgttgagttgcacattgctagcgcactccaccacgcaagtattatcgtcgatactgtatccacggtctgctccatgtccgatattttctacggctggccagctctggaacgcggcgttgacaatcgtagcctacgtccccgctaactcgctcatctccgtggtgccgcgagcgcttgactccctcacgcgcgcccaggccgttttcgacctctttccctccacctccccgaccgccctctctgcgaagggcattgtccagtcactcctcgacagtctgcagaatatgaacgcacagggcgcatgcgcagtcgccaatgatgagccgataggataggacttattcgtgccatcgctcgaggatcagcaaatgtctaacaatctcttccctccgtttatgtccttcgtgccgcaaaccaaggcccccgacctaatgcagtttggtgactgttgatacttgcgcctgacccgggtatccaccacgccataacctcaagggctggaatctcctaattattggtcacaaccgctctcgtatacgcagatgaattcctgccatggtatgaagattctcaccgctaaggaacgtgacgctgggagaatatcgcattacgatagtactttggcgttgtctccttggtctatgaggaggggagggcggacgaggtaccgttgatgagaaccatcctcccgctgaaacattccgaggctctatagtttcatgttaagttgatcgtacacgacacagtttcagccacggtcgagcatactttgaaaacctagggattagcggaaagttctccttggggtacttccggtacttccggcacttccgggaaatctttcaagaaatttcctttctggttgccttgcagcttcgacttggggttgtcctttcgaggcgcataccatgatagagccggaattcactcaataataaggcttcctgtcaccggggccttttcttcagttgattcccctattaggccaaaatgagtctctttttgccgttctgatatcaaaaattctacttcgtatattctgtcagactggaatgggccctctaggccctaaataagaccttggtttttgtttatgggtcaacaacttagtggtaagatagggctgtatttttgccttctaccatgcagatggtcgtagtaccaaatatacccatactaattgtgaacctcataggggagatggtgtatcaaatacatggatttacacagaatcaacagggaattaaccggaagatcatacaaccagcttatattaagccgtggtaatatatcttctaggccaatcaacactgtcgataaccaaaatagtggagaactcccaaggagcaggttttaggagggttctgtcttcacgtgccacccgggaattcgagtctcggctttaccaattattttcaatgagttgctactttgtgactactagtcagttatgagccagcgactattatgacttctgcaggcgtaagcgcctctcatcggaccccggaagaagatctggagcgcgagcggatccgtgatttgtcgaggtttgtggcgtttggccagtatccttgtcccactgatcaccactgatcatttccataacagatattattgtacagtcagtcaagcgtttccagcacccgatgcaacgacttttgaggaggatgagacgcctgcgacattgacgggagatgaacagcccacaggttgcgagctagccaaggacattaccctcaacgcactcgctcagctcggtgtcctccgcttcaatgccaaccgctccttcgtgtccataatcgacggcgaaacccagcatatcatcgccgaagcgaccggctcagtgtcgctacgagataagaatcgccacaaaccaggagatggtatctatctcggagcgcggtcgctagacctgatctggggcgtttgtccccacaccgttcgcttgttcacaggccgcgcgacggacgaaatctatactgataatgtaaccgccaatcgaacgcgccatattattcgagatttcaccctggaggatcgcttcaaggatcgaccatatgttctacagtggccgcatatgcgcttctacgcagaggtgcctctattcagcgcttctggatacgttctcggctcctattgcattgtcgacaacaaaccacgggcagattttggagatgatcaggtcaatgacctccaggaagtggccgacgccattggactgcatctggagaatgtccgaatgagccgggcccatgttcggactgaaggattggtcaaaggcttgacagatttcgttaaataccatgcggactttgatcctaaagaggcctctaaccgtggccgtcttcagtctggtgttaatgcagcgaattccataccacatgaaattgccgtcaccggtccggtgcttgatgtgccattgggtcatgatgttcgatgtgtttctcccaagcccgaacgatcgctttcctcagccgtcacgggggaaggatctgtgtttttctcgcaggatcaacgctctacgaccgaactgtcatctctatactcggggttttccgatcgaccagtaatgctgagtcccggcgaagaaaagtcgatgggtgaagtattgaagtcagtagatgccggtgcagctccaggtgtcgatcaagagttctcgcagctatcattaacccagggcactcccatatacgaacgcattgcatctatatattcgcgtgcaagtacattgctccgggaatctatggacctggacggggttgcattcctcgatgcctgtccaactaattttgcgttgtgagtacatccatctttctattgcgtggtatcttataacatttcttcgccagtgtacccaaagagccagaagttagggagccgtcgatagctgcagatcccgggttcccggctgctccgctgcctatccctcttgggctagctcgggttgtgtcgcatgaattcgaccttccgtgcgatactttgagttgtgcactaaagttgccatctaaaggcaatcctggcccaaataatcaaccacgaataccacagggattgctccatcaaatgctcaagtctttcccccaaggtcagatcctaagtttagatgagcctattgacgaggatgattgtttctcgaatgattacactagcgactttgattctcggcctgatcccaacactcaaacctgtgcaaaacaccttgcacggtgcctccccggtgctaaatcggccctgttccttcctttgtgggattggaataaatgtcgttggctttctggggtgctggtatggactacaagtagttatcgagctcttgggctggaggagttacactatttcaaggtttttggtgattctttggtttctgaagtttctcgaattcattgggcaactaccgaaagatcaaaattcgatttcatatcctctgtcagccacgaactgcggtcgccactgcacggaatactggcgagtgctgaattattacatgccagttctcttagctcatcgcaagaagagatggtgaccatgatcgaaaaatctgggatgacgttgttagatacaacgaatcatatgtgagtccacccgagtagacattggatatagaaaatgtactaatacgccctaggttggaattctgcaaggttaacaatttgagccatacggacaggatgaatgaaatgatcccagaaaatgacacggccaatcttatttccgattttaacattagccatttggtggaagaggttgcagacatattgtacaccggtcagcgagcacctgagcaggtgagccagctcgctaaaaggatgtcgtccaacaaggaagcatgcgattcgatcagcaaggattctagggcacaaaaccaactctctgttgtcgtacgagttgaccaaacggacacctggatgattcgctcccttgcaggtgcctggaggagaattgtgatgaatcttctcggcaatgctatgaagtggaccacagccggcttcatcgaaatagcgttatccaaagtcagagaccgatcggactcccaatcaccgcttgtgcatctctctattactgataccggctgtggaatcgcgcccgatttcatcaaacacaaactgttcgccccattctcccaagaagacccgctgtccgagggcgtcgggctgggtcttagcatggtacagcaattggtgatgtcgctcggggggcatgtcaatgtaaggagcgagataggccttgggactcaggccgatgtctacatcccggttcaatatctacctgctagtattgctccggaggatagcctgacaccgacaaccactcagccaggaactaccccaatgcatgcatgcttggtaggcttcaatggttatcctgacctcacagaggctcccactggaattctcaccgtcgaaagcaaacgaaatctttccattcagagtgcacttgcaaatatcttcatgacaaagatgaagtggagaatttcgctggctgactccatcgacaaagctcgtggccaggtcattgtcattgaggaggaactcctcagacgaactatggatgaaaatggtcaacttgtgtcagaaatggcagctcaaaatggctttgacttcttcatcgtgctgagcggcaatgtcccaatcatactcgacagtctctctgtcaacatcatccgcgttgcccaaccgtacgttacaatttctttacaatttttgatatgaaaactcatctcttttgcagattcggaccacagaaaatttacaaagccgttgaaaaaattatgaagtggcgcgaaatccaaacaaaagcctcgtcccctgcgcccgaagctgctttccaggtcatgtctccaccaatacaaagaaaaatcagttcagactccgactctgacgtctgtggtagagggacgtccgagtactcgaatgaagcaatgagctcaccgggaggatcaagcagctccacaccccgaccatccagcaagcaagcactggctcatgtgctcattgtggacgacaatgaaattaatgtcaaggtactgtcccacgtcgcttccgaggtctgagcaccgctaacacaaactagatcatgtccaccttcatgcgcaaaatcaactgcagctatgacacagcccacaacggcctcgtcgcattggagaaatacaaatcctcgaactttcactatgacttcgtcctgatggacatttcaatgccggtgatggacggcctcgtctcaacgagcaaaattcgcgaattcgaacgcgaacataatatcagaccctcttgcatcatggctgtcactggagtttcctccactggcttccagcaccaggctactacggctggtatcgataactacctcatcaaacccctctcccttcgcgccctcagaactcttatgaacgtttcatgataccatctatttgaatttagaatggctgatctttggccctcattgcacagcgtggtgttggtgggtttttcttcggtcttccgtgtgtatagaaatgaacacgctatagaaattgcgtcctgccttggttccagtacgtattttgatgtgagtttctcaacttgtacaaagataagtaggttcgatgaatgtgagacacgccaaggatccccgatccccatgtctcacaagtacgatgacccctgtacttgtcgagagcgaaccatatgccgcggatatctctgctccgtctcggccttgccaatatttaccccgcgcctctcgttgatcatgtacaacgcatgtcatattttgtacatcaagaaaagctcaaatgaaccacatacctactggttcagtaacgaatgcacagtggaaatattcacccaaatatcacaaaattgtctcatttctcatttagtctgttaggatttgttaattgtatggttaaaaaataacgagccgcgtgagagtcgagtgcgtccggggcctatcgcattgttgcattggggttggggtgttgaaatcccatctttatgtcgcgttggaggtgttgaagagccatcaattcgggctgcaagggctgtgagtcgctcgggctttgcgtcatggttggcatgggtctcgttcagtcgcgatcgatcttctctagaatgagcaacactgccttgtcgccgtgtccctttacatagtctataagttcctcagtaactatcttcaccaggccctccgccaccaacttctcaacctcggcttggaaccctccagacacccagatctcttgcaaaatcgtcgatacaacgacacccttattcttcgcgacccggacgagctctctcagagcaggatctggcccaacatgaccaagagtgaaagttcccacacacgacacgagatcgtatgttccatccgccttgtcaatcgggcggttcatgtccgcgactgtgagatctcgatagatgccagtctttcttgcgacagaaagcatggcgggagacagatcaatgccatcaattgccttggcctgggccattgaaagagccactccgaccagcccggtcccgcaaccggcgtccaatatcacgctgtttgtggcgccgtttgagagcccgtgtttgacggcggcttgagcgacaagcacgggagcaacgtagtcctgagcactgtctccaacttcatcgtcatacgaggctgcccatttctcgtatagagccatgcaatcttcggtgctgctgctggcgcgggcttgactgaggtatagttcgctggctgagcttgaggccttggcctggattggagttggggccaacatcgtggatgattgagattggtgccgtagaaggggctttgttaaatggtttaggagattgaaatattgcgtgtgtggttgcgaagggatcttggtatttctgccctaagagattagaactgaatgagttgtagtccattcccaagcctttgcggtattcttatagtcattggacagcacttggacatattctagaagttatggcgtgatgcggggttattgatgaatggacctgaaaagagtgaagtttggtcgatcgatgatgtcggtggaacataggttcgagcgtgctgagcctgggcctgggcctaggcatgatgcatgttcctacgctgagtatctacgcggttgccgaggtaatgaatgctcatttttctaattcaattatccgcagatggaagatatgaaaagcagtaatcattgctgttgatctgaggctctgccttgagtcgtaggcaagactagataatattttgtcggacctttcttcctctctgaaacacaattatccaccagtcatacatgtcatagggatttgtacttggccaatcatccgatctgatctggacatgtaacctgttctcttgttctcatccatatcccccataaattaagattagattgacgtggagggccccaccggggttaccattatagcgtcgatctatttcctagagtggcttggctccatcttagcctcaatttattccgaggtcgagtaatatggggtagctgtggagtgaccaacctcgttttcttaccagtgctccttgcgtgcacccatgcatcattgcctagtgatgattgggtattaacttttcggaggcttctaggccaacattacagttcaatccaatagcaaataatgctagatgccaagtgagagtgagaataattttgccgcggtagccagatacactgaaggtcagtgataataccactctgtcggactctgtagatcctgtttgtgtttgcagatcacgtgcatacggtatttttcattttcgacattgagttttaagcctccgtggcaccttccgtttcgggaaccgaggtttcccttcatcttccaacgaaagtctagatggagtaggaggtattattgactatataccaagatttatgtgaatactcacacaacagagcagctgacttgacattgaacagaggtaggaactactccgatcgaggacgaatccatgcctgtttcgcagaagggcctcacgaatcgtcttttgaggccactcaacagggttgagcccgggtacctttcatgaaatcttgaggaatcttcacgatacatggcttcctattgaggctcagcagtgcatctatgggacattgcccttccgagaaggaaatgtgctggatcttttacatagttggatctgtcagcatttggaggtattcatggtggcttgactgtcctgtcattgtcatcatctctaatgtctactttagggggttgtaagaccactttctcaagtctttttcgatgccgtcggaaacagatcgataacgagaatctaacggacccgaatgattggaaccacgctttcgctggtgaaacaaaatattccgagaagaccctccgattaatcggattctaccttcacgaaacgaatatatgaagagtttggaaatacctcgaggctccccaattcttggtcatcttcggtcgccactattgccgtttcatatctcttccagttacaagtcgaaaataaagatggaacgacaacattcgatattatttcccttgtgtacacaatcttcgagattgccgcaggtcattccaccaaatctcggcgtaagcatgatgcccatgttcaaacccgctacggccccttttctatcaagccatcttggaaatggaacacacaactatggccacacatctcgttatgggagcaccgccgagcacgggcaaaaagaaccgcatctttgaatcagaggactgtcgatcaggtttgagttgtacctaaggcccaataatctacacaccaggagacagtacaattccccgacaatttctccctcgggcagattaggaaaatcctagctggcgctccttaccgagcaaagttatgctttcggctgcttttgttccctaagagaagtgaacagttgcggtgtttctttaacaagaagttggaaaacagagacgcgtcactttatgtacctcaataatattgcatgcaacttgtcatatatcgtaatatgaagtaatcaataaagaccttaaatcaaagattctctgtccgctccacagaaattgtttcccgtccaatcaaccacgagttcgtgactgccactcatggtcatctatcaaatacatagcactagtacggagttcgtatcacatgcaaccaaattgcgatcttgtctcctgtgcacgggccataaatggtaatattaccagaataggaacattgtggtacgctatgatacgctggaaattacgagatctttgaactacgaggtcttcgttattttcccacaatctttctccgccatcatatgtccaccttttgtttactctatctactttttgataaacacacctcatatgacagtgacgatgggcaagatgagggacaactcattccactacttcatgcggctgcctctggaactgcgtcgcattatctggatgcactgtctaccgtatcgtattgcagaagaagacatccctgaatgccttttcaacggctgcgaatccaaccaagcctgcgacacccgcaagacgatgaaacaaaacgcccagcagccgaccatcacattcgttaatagcgagtcttggctggtcgcactagaacagggacaaatattgaaatctgttgagatcaatactctggagtcaatatgggtacagccgcatcgagatgtactgcatcttaactggatacgactatactacactatctggggagttgatcacgatgctccgggtagggctgacgagttcctattgcatgcgaaggatcttgggatgcgtccttctgtcatggcggaacttattcacccttttaacttgaaggcggtgttagatggcggtgatggttctgatccgcccggtgacctgtcgccttttcatatcggcgtatctgtcatgccggtgcttccttatcactgcatagaaggtgatgatatgcgcgagatggtcgatgttctaccttgggcgaaaggccaaagaagcatgctagacatagccatggcgggggtttctctacatatcaccagggaagcagctctgagatctggcctgtttggattattgggtgatgcgcctgttcagatgattgatgttgacgacagggctcggttgagggagtttgaagcattattcagggaacacacattggaaaaggaaccagccgtgcaaaagctattcgatgcattcacaagctcgcgattccaaaaggccacggaaaaatggaaaaaaaagctgaatggtatatcctggcttacatgtggcagtcggcacgagacagagagctcggcattcttgggacgaacccgggttctgcttggctacctcacctgtcagaggagaagaatatcagcatgtctcagtatttacccgatgagaggcatccgtgggtgaagcaagctaggcaagtcgcccccaagctgcgactgcggatcatggtgcggtattgtaccaatgagtgttgcataaaggagctacgtcccgaattcttcgggtatccataagtagtacttatttggtaaagagatatttcgagtaccaattcaacagatagaagaatatgagcggctttaaaaagattctctcctttggcggatgggcgttccacagagtcgggcacgttccagcgcttcagagatgccactaagccagagaatcgcgggacatttgtcaataacctggtgagcttcgtgagctctcaaaatctcgatggtttcgattctgattgggagtgatctggtgcacctgatattccgaacatcactcccggaagtcctgaaggaaacaactcccttgctttcctgcagttgctctgaagctagctgcccagcggaaaatccatttccattgcgctcccgacttcttactgatacttgaagcagtatcctgtaaaggatgtggcaaaatacgtggattactttatttacatgatgatgtatgacttgcacggccaatggggtaagtaacacagacttgagataaaattggctagaacgacgtgctaggaattagagcggtcgggataagcgaatcgccgttccgcctcctgtggacacttggagactgtaacggtactcaaatgaccccaggaagattatagcaagtgaaataattatagaaactataggcctaggaaagccgcgctagatgtgtctaccgctttcaagtgaagaaacattcaatcgcaactgggtctgccagcgatacctgcctggtagagagggaatccatccgatgcaccgttttgctggaccaaacctagaacagacatggctaagttctccaggtgtttgctcatgtggaccactagcttcttccaattatcgaaggtatttccacaaaatcgacacgactcctgtgacgtttgtttgatctcttgacgacactgctcgactatctcccacagtcgatcgatatctaagtctcgttggacttcagaatgcctctctgaagtgagatcattggatttcttcaccttcggctcgagcatcttgtgctcacgaactagatgctggacaaaattgtctttgcgaaagcactttttgctgcagtcggagtacgagcagacccaccactctgactgccggtgcctttcggtctcgtggcgcacccagtccgctttccgtttgaatgatttatcctcagagcagtcggaaaatgtacatgtgaatggttgcaaatctgcttgaacatgtttcgaccagtgggatggtttcaaaaacttcttgacctgaaagcagatggggcactcgaactgagagggaaacagcgagacaggaggaatgggaactgcaggggggaattcagccacaggcgctgctgtttcgcccatatcagagagccgatcagaatttcgactaacgtccattccctggagcaagcctgaggggtccttaggaagctgcaatgaggattccccgcctcccagagcaaaacaatactcgcctgagcggcacgagcggttggtgacagcgtctatatggtttcgctggaaattaacaagaacattataccggcgaagctgctcactcgcaaagcgatggaccaaagcaggctccagccgtgggtacaaatgcagaatgtgctttttgaatccttccacggtagggtcgatcaatggtgagacagcaaggaagtccatcgcaagccctgggttttcaacaaggctgcggatatcgctatcattgtcttcagtcccttcagtatcattacccctggctgtatgctgcggtatttggcctgaatagggcccgggatttgcacactcgccaatatttgctttccccttaacaccaggaccaatcgccgtgttctccaaacccttgtgtagggtcgccaacagacgggaaaattcggctgatttagggagcgagaagattgtcaatcccgagttagtgtccacaatatatggatctgctcccgcttggagaagaagctctgccgtctcatagtttccccgccagcatgctgcgaacagaggtgtggatccatagcgtccacctggagcatcaacttctgcggaaaggacagatgcaagaatagctttgacgatcggaaccaagccgaatgaagctgcatagtacaacgggttcgttgtctcgatggctacagtaggtacttcagggataagtgcctgcacccatacgccaaaattacctcgacgaggaagatattgagaattaaagaatttgttgacgagttgatagtcgcgatcatcgaaactgcatgatccgccatgggtagcccagaactgggccgcatattctagaaatgggtgctcgtgctcgcgtgatgcgattgaatcgatggagcttgtatatccagacagaaaattatcgagacacaaataggtaaggctgagtcgcattatgatttgatcggcggtttcgtgattcaaactgaaatatcgcacgctagaggagcggatccactcggacgttaggaaatccttgatagatgcgtgagataacttcacatttctaaactcatcctgggtgatgagtccctgacaaatatcgagaaggatttgcggcgaaaccagccttaagtcgtcatccaaatatgtgcacgtcttctctagtatgactgcttcgctcaactcgggtagggtgagcgaacgttttgagaaactgagccaaaagagggcgttgcggctgagttcccagtcacttggtgggattcgctctaagatgtgtatatatgtctctcgtagagtttttggcaatgtttgcaatgcttctcgaattgacttggcggtccgaagtgagccgagggtttccaaagaaagctgggtccagcgaaatctgcaaaaatgggtcagatacgaagatagtattttagtgtgatactgacgatccatcagctccttccagaatagtcgtccaaatctgatcttggagacgcgtgctcagattcctgagcgtctcgtcttgctgcagtctgaagcgtatgaatacgtcgatatcgtctctgacaatttcagcattcatatgaattacattggcatgctgtccggggatcagattggccgttccagttatgagaattcgaaggtttggggccaaattcgagattttcagaagagaacgtattatgatctctttataaacactctcattaattgcatcaataagaagaatgactcgtttaccaccagagctaatcttgatgatggcatcttcaatggcaccaatgtcgattggacgtctgtatgcacttgactttgttgtcgctttgaagagcggccagatagactctaataccgagggaatcgattcagagagctggactaggagcgatcctagaatgttcaccggctcttgaaaggcagtgtcgtcaaatttacagtagaagtaggcaaagaccaatctatggtcatttgaagacatccgtaccagctcatcgacagtatgagcactatagaatgttagctcaataaccactcaagaacatggaggacttgcaaaagtgttgtctttccgattccagctatgaaaaggtgttagactatctcagtgtataatgggtcagggcgtacatttgcctaagaggacgaaaatgctccgatgagtgccatcattccatagccagtcattcaaaataccatcaatgaaccactttcctgtgtgatttgctcgcaaattcgaggcttgcagatggatactacttgggctgacaggagccaaccatcgggaaagctcttcgtgggctgtacggatcatttcatcatttcgtactttcagatcttgttccagagattttgcgaggcttgtgatttcactgtgcaaatctcgctggaggctattgctatcacttgtgataacaaggatcaaccaagattttaccctttctaggcgggtgaggtgcgtgttgagttgttcctgggtgaacggccattccagtttttgcttcactctcttgaatttgttcgctggctctttaatgtctgaaaggagaacttgaagagactcatttgttttttgaaggatgctcatcagaggttctggggtgataagagacagtggtcctaattttgtaggtcgtggaggctcaacttccgagtgaagatgttctagaattcctttgagagcgaaaagctcctcacttaatcttcgaatatcggagcttgcatcacgtacgccttttgcatatgctatgaggcgggggatgatgctgctaatgtcgatgatcagcgacgttatggaaatagggtcagccatggtttccaaaacaatgaaatgccatgcacatatttggaagtctttcgaaactgggaaatcaggcgggctgcccttgtcccacggagtgcgtagtgacgtcaaatcggttgagaataatcttgtaggagcgggttgaaaaaaaaactcgctggtggacttgggggcggcaaggtattaggggatgcacggatatcaaagcaagtggagacaaataagccaataacatctaataactaaggtgatgagcagagaagtgagcagatggagtccttcctcacatccctcagcagtctcccaccgcttcctgccaaagctctcctccatcaacatccagatacctccgtaatggcgccaagactacctctttcaaagctcggaaatattcagaatatgatatcgaacaaatcactgactgccgcgcaaatggtcaaagctgctgactgcagtaagcgtcttatcatcaacatcaagaacaactttcgccggttcgaaaatgtagaaagttcgagtcttgtcacgaagacaaaacataacacctccgacgaaagaagcactgtgcgatcgcctcctcgaaaagcctgggctatatttggatgatattgttacgatctagtgatcgcacttcgcatgtatttgtactatttgcattttcgctcgtagataagtggatgtgatgaacgaactgatttcagacggacaggctggtctccgttaggcgcggcaccatttcagatagctattattccatcgcgacaatcgtagcggtaccagatactactaagatggaattatgctctcttctatagcctgatggttggtggtttatattaatcaactcagtgagcggtcagtgtgaatgaatctcacagacacacgaattgtccaggggtcaattgtgttagctattgcaagtgtactggtgcacgatatccaggaaacagtttctagaggatgaactttgatttgctgatgaagcctgtaagattgccaagcctacctgttgaggtgccaacagccgtgcactgccccggggctcgtgctcgacatcttcgcccttttgtacatcagcccccctcttcgtcatcctccaaccatgagttccaatttatatcaattgtataggccgtgaaacgcaatgtctgggcttgaaatcgtcggggtcgttgccagcaccttccaactcgcagagattggaatcaaactctcggtcaagctttgttccttttaccgccagatcaaagatgcggataattccgcacagcgtcttgcaagtgatgtctcactcacttgcagtatcctatatcaattaggcaagatcttggaacaggacagccagacaaagctttgctcccagcaggcctttctgacggcccaggaagtcttggaggaatgcgagaaaatcttcagtcaaatagacgaagcaattcagaagaaagatccgagttctggtaaaagcaaatgggaacgtggcacacggaggcttacaattgtgatacttggtcccgatcttgacgtgttgaactcacacttggacaagttaaaatcgaccatgttgctgatgctgaatgtgattatgtatgcaagagaaattaaccggtatgtctcatctaaagtatctctcgagatccacgttgttaaactccattgggtaggacatccgatcattcttcgctcgaatgccaacgccagttgattgaaacgcttctccgggagaaagccgaaactgaagctaggttaaagagactcatcaatgtggccgatattcgttcagattgcgatggagtgggtagattgtcgtcttcaacactgggtgcgaaacctagcatgagagtgtggcagcgaccttcaaccggaaacgaaattgacaagtattatgaccttgtcaaaagtctactaaatcaaatcgatgcttgtcaaataaactttcaacaagatcgccatttgaggattagagatggagtggtgaatgttcacaaggccgaacttgccatatttcaacaatcccatggaaaggcagcggcacaggcttttgattgcccctatttcagaattagccaccgaggaagggacagttcttttaccccaaagccgaactccaacatcccctctcaaacggctgaggcgtcaacgaaacgatccaccttgatcacattgggaaattgccattcttttgggcgcagccccttgcctgctattcgtcgagcctccaccagtagtttggatcttgaggccgctcataaaatgtcaaggaatcaccccggttaccgtgaatacactaaacttgagcttaaagaacctatgggggaaatgttcatcaaccagtccagcccaagaattagaagaaactcagcatccgcagcagaccttcatgaaacttctgttggcttctcaatgtccgatctgcaccctgtggccagcttgggtcgagctcggtctccgggtcctttaccttcaacttccaatcaatgtgtggccccgcgcgagcagtttgatagagactaccctctcaacccgcgctatcctacagcgaagtattcgcttgatcggcctctcagcatgactgtgatggacgagcatccccacatgctgcgtaaagaaagacctaaccggcctcaagggcccccatcaacttctgtgggatttgacaatattcgcgtcagagcccgaccatccacatacgccaacaacggaggccacgaccttgctccaatagccttaccccacgagtctgacgatagttgcgatacgtaccccgacaggcaccgtcggcgtcgccgcatacatcgctgcgagagtgataggcacggcggtagtcgatccctggaacagaaagcacttgatgccagcagttcgaaactggtggcgacctcaggtaaggaaagtcccaagaagcgtgttgcgtgggatactttggaagatctgatgctttcctggacgacacttccccgggatatgattcggctatgagaggacgcacgaagcagatgttgaaacgcgtcaataatgccttattccgtattttgtgccacccaccctcgctacgcgaccgagtacggggtatgaacctcaaccagaataatatcttcacgtgaatgagtgcagaccatcttttgcttttggactcttggttatcatagcatgcaaggagttgggttgtagtagaagttatgaattagggcttgggtaggtggcgaaatatatatgccattactatctgctgagtgacagtgttggatatggaagcatcgtctcagcttcacaaattgatctgtacattcccacaatgggtttatttacatctcttttgttatacaaaacgtgccgtctggccataatcactcggccgatcctctaccgtaacggcaactccataattaaccattatattccgctcgtcgctcggatatgccagtttctcctgactgcttgacggactggtagaacggtatgcactcgccgactggtacgactcctcctttcccctgaagctattcaaaggaatatccgttcctctgaaagtacccgagtggtgcgatggtataccagtgcctctacggccccggaggttgtacgagtcatacgggtaggatgtcttggagggcgagatagcagctttcaggacgcgataaaggccggggcaacaaccgatcataacggctaggagaatggcagttagtaaaacgattgaatatgcaagtggaaaagcgggaaatataagcataccgattgatgcctcgatggttccccatagcgctagccatgatggagcggggactccattttcagtatcacctaactgaacgacgcggatggtggaaatgatgatacacacccagccaaaacagaatagcccgccaatgctcagcttttggcggcttttcatctgcagattccagatcaggcggattgggaggatcatgacttagcgtcgagttagctcagtttaaggaataaggagcatagcacgtacttgctaagtcagtggctatatccaccccgtatgcgtagtacaagctgataacggctgcccgatggtcgcgtggagtgttgcattggcctgcagtaaaccaggcatggaagctcgaacatgaaaaccacgatgagagaatgcagccaatgataaactgaaaacagtgtcgtcagtaatttgaacaccagcattcagacgaaaaatccataccaggacacaaaatcccataataacccaccaggcgataatgtacttctttccaaccaacaaccttttatacatcgccaagagcgagaacttgatcatccacaagcagagccataatgaagatgtcgtgacaaaaaagacagtctgtaatcggagtccatcttccgagatggtggcatagggtggaatcgttccggcaccgactgctgctaatcgaaagatgacaggagagatgtagatatagagaatgctcaattccaagaagaatatgtaagcgataatcagaaggtaatcttcacccttgaggtctttgtaactccgaatggcaccagcaaaacgagtgcctacaaccagcgaggtcagtacaatcaaggcaatgccggcacctttaatagtttcgggcccaaaagtgcccgtaatggcctctcccatcctttattgcgagactgaattttagaaaagtacgacagggaccgcgcgggcccctgtcacccatatacatcgagccatttcaccagaactttaacgaacgcatggcggccgatatcttgagtttgagattcacagatgggccacctacagccaccttgtgcaaacttcgaggggtgcatggcttagaatgaacagggattgtaaaacatgcacgaggggcaatatacgaatctctttcgaaggccattgttgaagatgcatgccccgccagccctgggccaatgatagaagaaatatatagtgccggtggggggagggcccgcgccctcagccacggcggttgtgcctcccgtggccattgggggagccgatgacgggccgaggcgcacatggaggggcctgggagagagaggaaagaaacagatctaactagacaggcccatggcgtgagtcagtatagccgtatccagagaaagattatccagttgatcttgaaaggaacaaaagacaggacagatctcggttaatgccagaaggctggggtgaaaattcgaattgagtttggacttctgaaactaagccctgcataagccccggagccctccggaatccgggcgatggtgttctgcgttggccgctcgcttagaaaattcatatcccctatcttttgagagtcacttgcgacttgaggaaaagaaagaaaagaaagagtttgtaacagataaatacaactttacgtaagaataagatggacgagcgaaacaatcgctgccggtgaatctagaagcaaacccacaagtccattgttatgagcttcaagctatgtagcttaacccttcgggctgcgccgcttcgcttagatctggaagcgagattattatatatacgcgttaacgaaagcgaatagcctagtcatactatacgccaattatacggccccgttgattagttacttaatgacacctaatgcatctccggaacctcatcggatcagagcgcaggggaagttaaaaaacaataagctccccccaccttagtttcttctccttttttctttccaagccattgaatttgtctatatatcacgttcgtttctgtttgggttacttgcatagcttttggatcatgcatatttcgacctttattggcgggctatccgcgatttgcggattgaccctagcccagacaactgtgaccagcccggtcatcgaagcggatgatttcagcgtcactggcgcattggaggatctcggtgtggatgtgtcgcaaattcctgcattggagtcattcaccgccattgagacacggtcaaccgataaggcctgtgcagctgctgtaagtaagctcgcaagccatcgagcaataatttattctaaatctctcttagtgcgcaagtttgggattcctttttggctccaaggttgctgctcaagatactactgggtacagcaacttcactagctcgttctggtcagtgcagcaagaagaggtccagcctcgttgtattttccgtcctaccaagaatacggaggtcagcactgcagttttactttcccggttgacaggctgtgagtttgctgctcgcagtggcggccatgcggcctttaccggggcttccagcgcgcctggcggaatcagcatctggttcaaggatatgaatgccgttaccctgaacgcagacaagacagtcgcctcaattgagcctggaaataactggctcactacctacactgccctcgagccttatggattggccgttattggaggtcgtgccgccagcattggtgttggtggctttgttttgggtggtggaatctcctatcactccaacctgtacggatgggcttgcgataatgtccacagctttgaggtaagaatatacatctgtcataccttttgccgaatgaattactaacaaatcctgtttaggtcgtgaccgctagtggtctgattgtaaccgcgagtgaaacttcccacgctgacctatattgggctctgcgcggcggtggaaacaactttggccttgtcaccaagtacaatatgtacaccatcccctcgccaaagctttacggtggtgccagaactttcctccagaccgagtttcccgaggttatcaatgcttggatcaacgtgatcaacaatgccaccattgacggcaaagcccagcaatacgtcgccttcctccggacccaagatatgaaccttgcctctgctgagttgacctacgtgcacaacgaccccaaccccgaaatctacaagcaatacagaagcattcccgccatttccgacacatctagtgccaagacccttgtcgagtacgtcgagtaccttgagagcgagaacccattcggtcttcgcgaggtgtactggcctatcagtgcggctctcgacgagaaatttgccaactgggtggtggatctcttctactcgatgatctctgaggtggccgatgtcgccggcgcccagcccgtgctcatctaccagggaatcaccgaggccatgttgaacaatatgaagaaccacggcggtaacgctcttggactcgccggctcatctggccctgttcaccttttgcacatttcttgctggtggacgaacgaggctgatgacgagactatctacgcgtttgtcaacaaattcatggagaaggtcattgctgaggctaagagcgtcggagtcttcaatgaatatgtttacatgaactacgccagcatgttccaggatgctgtcgctggatatggtgctactaacaaggctcagctgaagaatattgccaagaagtacgaccccagggaggtttaccaaaagctccagcctggttacttcaagcttgatggtcctcctgtgactccatctttctagatggacttgacgagaaaaatgtacatcatctaccgcgggatataactgtatgtagaatgcatcttgatgatagcatattatctatatcataatttaatatctgtgaattatatacatattgattatatcaggaggcttgaaggatgttgtagaaaaaagaagcggctcgggtagaaatccacggttccacaaatggaaaccctggttccatcccgacatatccatgggtcatggtcaatttgcatagttaatgatggggctgtacgacgtcgggatgggtcttgtttcccgggcggaaagtgtcgggcatacagaagggtttgaggaaagagtatgggggccagtcatcgggccgaggtggttgctgccgtggcgagaaaatcgagagaagatgcttgattctagcgatgcatctgacaaattcatggaggttgtaaagctctggcaagacgtccggcccaacgcccatatatagcctcgatatgatggcccgggattttggtatcgggattctgcgtattctccaaatttctaaagtgaggctgtacgtgatgatcatcgcccgggtgtcctctttcaggtggatcccaatcttagttagcccagtcaagatgctccaagatgttaggggacttaacaggtttacgagtcgacattccccaagtgcgataccagcccctggagcacctcgcttgtccatttggttacatgggaaccagatcggcgaccatgactcgaaagctaaacacacagcttgcacttgccctcacgcaacgactgcatctgcttgtgtcatctagctcacaccacaatttaaggttgtggcaccggtcgcaggcttgccgcgagcgctattcggacatcccactccgtgcttttggaaatattcaggagtggatgggctgagaaatgcgagaagccaacacaaactggggtctatgtagcttgcgctgaaaaatggctcgagttgatggctgtgtctgacggtgtgaggaaacacgagttggagtctggaagctttccatttggcgacgtgtttctcccgtctacccgcgacccacgtgctgatctccctttcgggcggggtgtacctcgataactaagaaatctacagcgacggaactaagcaggtcagacaactttcaatgatattctttagcatacactttacatctatatatttagcagcatgcccaggtaaaggagaccttcgtggaggtatcacacatgtgtatcctgtagataactaagatattcctagttaggaaagtccgtagtcggaagaacctggcattagtcctaattgggaccactcggcgactttggaccaatcacaggcccggattccctcgaccggaaaggggaacatctatatccatggatatgttgtacaacgagaaacctcccccaaccttcagcgtcggcttgttgacaaacgcgtcgtctctaactccaaaccaactctcggtggcctacttttcaacgtgatccgactgttactaggatattattttcttcgttcacaacatacaacattggcgtgacttcccagcatgccaaacactttgacagcatcgacactgcccattgaggacaaacaggggaggggatggcgcttttgggcgatctacctctcgctttgtgtgtcaatcttgttagctgcggttgaatcgacggtcacgtccaccgcgttgccatctatctccgatgaattgcatgcgggaaaggattatgtttggtttgtcaactcgtattttctcaccaggtgagttgaaagatgaatccaaagacttcgaggaagctgatctgactcttcgggtttcaagtgcgtgctttcaaccgcttttcggacagactgcaaatatcttcggtcgacgatggttgatgatcggcgcggtggcatttttcgtacttggcagcggtataagcggtggtgctatcaactctgccatgatggttgctgggcgagcgattcagggcattggtgggggaggtatcaacgtcctgatcgagctgatcgtcagcgatttggtcccattgcgcgaacgaggaaacttcatggccatgatcttcgcggtgttctctattggaacatcccttggtccgttcgtcggtggtgctctagtacaacacagctcctggcgatgggtcgtgagtgcttaatatacttcacaccaagtcaagctcacctagctaacccatgcatcaacaatcaacagttttatctaaatctcccaattggaggaacggcactcgttcttctgttctttttcttacacgtcaactacaaacaagagccctgggaggaaaatatcaagaagatcgattatctcggcaatgcactactaatgacgtccatcgtctctatcctactagccctcacctgggccggtaccgcctattcctggtctagctggcgcatcattatgtgtctggtgctaggatttgttggcatggtcatattccacatttacgaggccagcccttggtgcccagagcccatgatgccaccgcatattttcggcaaccgcacctccttcgccgctctgattttgtctttcatccacaacatgctcaccttctgggtggtctattttatgcctgtgtacttccagtcggtgaagctctctacctcggcccgtgctggtgtgcaatttttacctaccgtaatccttgctgttccgactgctatagtcggaggtgtcgtcctcagcaaatggggcttctataaaccaattcacatctttggaatgggtctgtcccttgtggggctggggctcttcacactccttgacgcagactcaagcgatggaaagtggatcgtctatcaaattatcaccgccataggtctgggtatgctgctcacaacgatactgcctgcagttcaggttggcctcgaagaaaaggatgttgggctagccacggctacctgggcatttgttcgtagttatggtgccatctggggaatttcaatcccggctgccatattcaacacacaatttgggcgactgtcaagccgcatatcagactcttctgttgctgcacagctgggaggtggagaggcatactctcatgtatctgcaaatttcatccggtcccttgagccgcaagttcgcgacgaggtgataagtgtgtattctgatactctgaagctggtctggcaagtgtctctgggatttgctgctctaggattcattgtcatctggtttgaaaggcagatcaagctgcgcaccgagttagaaacagagtatggaatccaggtcccgaaagaggacaaagacaacaaggaagctgttgaggcataggcagaacttcaatgaaagaattcgtctatggccatgggggatctgctctcggatattgctgtagcaaacaatgccacagaaaattatttcggcatcgccttcttaccatatgtgtaatatcatacttactttgtcttttcttcccactcgcaaaaatgcatatcctcaatttcaccacccttatggttctcatcaccatgtactgtgcattcgtctccagccatccaagtccgacagatctctgaaacaatgagcctatggttatggaatcacagttacatcccacaggcaatggcagtctcataccagatgaggctcttcaaggcaattatcttgcagcaaggaacgacgatatggcaattatgatgttgctaattccgggggaatgcaagacggtgttgaaaaaggccattctagtatcgaaagcggcatttgagtggataaagaaaaaagtctgtgaagactataagtgcaaagtcgcattcgcgcctacttatagaaggtaccctgatcttatcaagaatcacattattatggactggatatttggcactatgaagagaaacgaccatcctattcagaagcttggcattcatccagatgagatatttgacaggatcgttaaaaagtgcatcgagggagatttaaagatcatgggaattaaaaatgtctgttctgccagccaagatagcttcaaagacatcaaatcatgcgttattagcaaagtgatggagtatgtaccccagaagacttcataggctaggaaagcatatataattgcacttcaaaagaacctgaacctggttgagaagacaagccacctaataagggcagctgtcatagttgagtcttatatttctttttttcaatgacttggttaagctgataaatatatagatgaacaaacccgttttcaagccgaattggcgcaaattggtatctgatttcaagaacaacaaactgtgtgggaaataaagacatataaggcgagtgctaggaaggcagcatgaataactacattgcacagttgctggctattgaaaacagtctgtttaggagaggcaagggcagatgcaggtatatgataaaactttctattctgactactcttcctaaccattattaggttaattatgggcttatagttatcaaatcatagtacttcaacatactactccgtatatcaagggtcattcgcatctcatgcgacttgaataatatatcgaaatgtgatttcttatttttactttagtttatctatttattaaagaggggttcttaggagaggggcaccgacagccctgcctgcgaaacaggtgtgagagcagagtcatcactgggagtagtagggtgctagagaggagaagtggaagtctgcattgctatctaggcctcgggagtgcttttatgccacatagccgcttagtcatcttgctctggaaacccccactgcattagttagttaacagctaactagttagtcattaactagtaaaagatctcaccaaggaataaaatattctctccaatgttctccagtatcagcctctttgaacttgtcaataccaccgacaacgccgtcttggtccacttgccaatcacccatttccacccgttcagcccagctttctaaaactttgtgtagatatgagctacgcgaatcccaaggtaaataaccactatagccactgaaaaggtctgcctggtaaagttgatcaggccgttcggttcccggaaacctagcatttttgaatggtataccattgctacctcgagcaaacccattgcttccaatgctgaagggcagcaggagtcgactctggttaccagattgccagttgagatttttgtcggttggttctatgtacaaaccagatggaatgttctctgcccttccgtcaggaaaccagggccgattcaagggcgacttgttctccctctcccctcgaaataagagtagagggtataatggtatcgcctggtcggtattatgcaagcctggaatctgacgttcggcaagtggttgatttgtaaattcgaccggattttggagtcgaataccgggggcaatatagcgaaaggcgagacgccggatgggaagagccgagagaaaacattcgataaacgagcccgtttctatgaaagatgccttgataaccagttcggagtatgggagagctattccacaatcatacgtcgaatgtatcaaagttgatggaagtcgaatctcgatagcatcaagaagacgagtaaaggcactgactgccctctccacatccattggggtatattggtgaatctcccaagggaatactccaaaaaaatgatccacagattcctttcgacgatccgaatatgttgtaattttgccctcatccaacatgtctagataggctttcagaatgttttgtaatggccgccatggccaccgttccctatcagaccagatcatatcttcccagactgggacaaaagaggcaagctcagtttcttgatcgaatctatctggcgtataagtattcgtcttccctcaattgtactaaagcataaaaggactctcacactatcccgacttcttcgtcactctttgttcgtgttgagggatatagccacacataacgatcaccccacgatccgagtgaagattccggagcaaaaagttcatgttttccatgaagcgctacgaggtaatagaagagatgaaaatttgaatcagggtcaaatatagtggccttcgccgaccgtaggaacctgaccaagttcggattcaggcgggatgcgagatcgaatggaattggcgagaactcttcccaccaagttctagacgggatcgaggcgacatcccgtccagccccaatccatgcctgtttaaggatctggttgtgaagttgggccgataaatgggggtcaaatgtagtgaatgacatattggctaagacgtaggtcttgagagacgccaggtcgatcttaaagtaagaaataatgcattcaactaaataagtaagatagatagagaagatagagagagaagaagcaggttgcaaagtgggaagcggcctgcttatatggttgatctttgcaaacaaacaaataatgcaaacttcgagcgctcgcttaatctcgcctagaaagcagacattgcaattgtgacagatcttcccggacctcgggaattccggtgggagatgtagaacgagcggagcggtacggagtacttcgacacagataggcaactacctctagagacaattttcgaacatagcacatagatgagctgtttctgccctcttctgatgcatcccctagcatcgtcaaatattcaactgctccggcacagatactcaggactatacgggtaatccaggtagccagttttcgtgagacacgtatagaatgaggagcgatcgtatttctgtagggcgatgccattcttcatccgaaaagggagatcgggcgtggaggtgaagtatctcccaaatccaatagcaacattgtcatagtctgcatacaccatttcaatcacctctggggccgacgtcgcatcatatccgcccgccaggatcactggcagggacctcccccataccttgacaaaggtgaggtggtttggatcagggtgagtcgtcatttggtccaaccaccgggagttggcgaggtgtaagtacgcaatgccgagttgtcgaagctgcaggatgaggtattcaaactggggaaccaggtcacccatgatacccattccggaatactggctccacggggaaagcttcatgccaactcgatccggaccgattgcattaattaccgccatggtaacttggagagcgaaccgtgctcgattcggaatgtctcctccccactcgtcggtccgctggttgcacgaggcctgcgtgaactggtcgatgagatagccgttggcgccgtggatctccaccccatcgaacccgacctcaatggcatttcgtgctgcttgcgcatagtcagagatgtacttctgaatctcctcttcgtctagcgcgcgtgggggctggcaccctggctctgccgcaacagcactgctcgacacctgttcaaaccctcgggatgcgagcaattccgggtcggcagatcggccggtagcataaatctggcagaagatataacattctttggcatgaacctgggaaacaacctctctccaagcttcgcattgtgtcttactccatatccctgggatatgtgcttcgccaactgagtttgggcaaatattcgtcgcttcagtaatcaacagagcccccggatcagatgctcgctgggcgtaatattctttcacaaacggcagaggcacagcagcctcatcagctctatatcgggtggttggcgacatgacaattcgatgctggagctggcattttcctagcgccagaggcttgaaaagcgttggagacgggtgtttggggataatggtcatagtgaatcctaggagtgtctgactcaatgcccccgggagaacttgacgtgagtaaaaaaccagaaacattgctttatcataccttgtagatgagattcgttctttgttgtccctcacttatgcacgagaattgaattccttcgacttcgcgttttgaggcaagggcgccattgagcagcacattacgcgtctaccaatcctaaagcaagaaagaccggtgtaattgctgcaatgtcacgagccaaagcgaaaaccaatctacccatggaaacctgaccgtgtggtgtagatgtatgttcatgtaaagggctgtgagggatacagcgtcgatcacacaagagcggtctttgttcaaatgaatagagcacgaaaatgatgttcaagaatccaacacagccatgtattccaaacagagagtgtggaacgaggcagggatgatctcttggggaaagtccgggcttgatcccgcccgtggaggggccggcgaaggagggggtgtgtcgttgaagcaagggatgaccaaattggagtataaaagtgcactttcatcctttcctggagagattatcctcattgtccccattgccatattttcttgtccatctcaagagccttctcgttcagggcctctgcctgatctggaatttgtcagctggtcacaatatataccagattggaagccagcaaacagcaaatcgaacaagatgagatcaccaagtctcccgcgactgccagtctcagcaagacccgaggccattctcgatatttacaacgattatggatgtgtaattatcgaggggcttctcagttcatccgaggttgcctcaatgaatcaagagattgatcctggactggcaaaacttgctcccggtaaaaacggggtgccgttggaagagttcctgggcataaacacaaagcgattgccactggctccaaatagccgtactttccgcgaggtgattctggagaatgatctgatgcacgctctgagtgaatcgatattatgtgacagtcctggggaagggtatcatatcaactgtgcacaggtgattgagatcggacccggtaacgcggcacaaccactgcatcgagatcaaagtgtatggcctttctgggacctgattccatctccagcaccggaggcttgcatcaacttcttttgcgccttgaccccatttacggaggccaatggcgccacaagagtggccccgaaaacgcatcttgatgtcgacctaaacaacttgaatccgccccaacttctgccagttgagatcaaccccggcgatggatttctcttttccggcagacttgttcatggtgggggagagaacaggaccaatgagtaccgtcgtggtatcacaatccacattgcccgcaagggcctcatgacggaggaagcacatccactatcaatccctcgcgagattgcagagaccatgtcttacaggggccaggcgatgttcggcttccgaagcaactggccgatcaaggatggacccgttgggacctactggtccagtaactttgacgagattggtggccatttaggactaaagtctagctagcgcagaaaatttacttcatttgacgtattggtattctgtcaggtcccaccttaatgcttcggacacgttcgtattttacattgatacacgacccgagtttcaaatcctgtctgtcttaggttttcaagtcaagttgggatgaaatacttcctttttggcattatctaggtagtataatatgacgctgttaacaagatggttctccctctacaatatctctaatttcagttcgatttgctcacactggggcctatagcatttggatgatattatcggtcgtttgaagagaatgctgtaaatacagaatgaagatgaaacaagtcattctccatcccgacccatcaaccagcgaatgagatcatctttgacaagtgcttcaagatccttcgcaggtagcgtgatatgaacgtcccaacctgcttccttttggtcacaagtgagtcgtttcgggagaaaaatgacatcaccctcaatcaggccgaacgaaagatcgaaattgtggacaattccaaaactgtcaccaaaatccagaccataaatatcaagatgtcgccaactagaaaaagcaaggtcggtaaatatcatgccggtttgactccaatccttctggtttgcgatgtatgtcatgcagctctggaaatattttctatccatgtttcgtactttgttcctcactttgcacgccaaatcagtcaggaatcggagttggtctgtctgaattgggcaatcgtgggttttcctgcaagacaaacactgctctggcccggtatactccgggcctggagtttttaatcgaagattacatgccatgtttcccagaaactctcttgctgcggatagctcgatccgaccgcgcatgttgactgccatgcataagtctaggcagtcatatgtcttgctttgagatttgaccctttgtattgcgtccgcaagagccgaagtcaagacatcattgctcgacaagaagggtggaagatcagcgacaggaatagacgcactatttggctggaacatgcaggcgttctttaagacttgagaacattggtatttgagctgcaaaattcgctcactgttgaattcaaagcgacatgttctgagcgacgctgcgtcaaggggaacggggtgtattgccggcgcaggaccaagttctgccgtgtgatcttgggcaggagacgtgtctgccagtcccgcaaatatagcgctctgagctcgatcttgctcgtcaatgatgagcggcagcggggtaactgatgggtctcggcagcatcttcccagtaacgcaaggatttttgccgcgcctgttccgtcaaaaacaatatggctgaacgtcatcgccagcacgattgcatccgtgaaaatatttgcctggaaccgaatcacaggctgtctttcagtcgagggaataagcggtgggagcggacaaagatgctgcttggagtcagatgtctcaagcattgacatgccactctgcacgcctcctaacgcgctttccatagggaatgggtgatgcttgtgtaccaggattgtacggtcttcttttgtacatggtatttggacactctgaatgttatattttccatcgagctctggattaacgacgatgtgcccgagtagaaggggaagcacttttgtcaaacgtgtgatgccggcttccaacagagagagacagtgcgtagaattcgctgtctgaaaagacaatagataggagacatatgcctggggcgctatgtggtccaggggactgaggatcactgagtgatcaaaagaggtagacatgccggagtaagaagcttcgtttgttacttatgataaaaggtgaataactttgaaaatcttgctacatcacggcggggggaaggaattattatctagctgaactcattagaaccatgtctaagttactaagacctacattcaatacactgaaataggtacttttggccattgataacgccccttgcagatcatgcaccaccacctgtgatggcgaatgcaaatcgatatctagctcagcagaccgtctggtaggattgcatagctagctcataagtacgaaatacatgcatcaatttaacactagtctcagtaattactaagccataaatacagggctcaaaaaagcacaccgcaatttcatttcctcccttatctgtgaattctgtgagctgggcattgcttccgagctgtggtatctaagtatgatgctgagaggaagtccatcgtagtcacgatgcagctcctgtccaaagtagcccgggtccgtctccagcaccgatgaggtaatcaggcaatgatcgccgaactctgacccaaaggctttagtgcacacttcgtgtagaagtggttgttgcatgggatatatgtggaaggtcttgctaacagtgaaagactactgagctgcctcatgttcgccaggtagccgtcttgcatcgttttctggccgaattcccacattttcttgcattaatccaccttactgtcgaaggctttgacctgctcatcgatgattagggctctgtctgcttgaagaatctggaacaccttgaggacaggctttgtcatagtcatgggtgatgtggtagatgacacggaggaaaggagggttgggaagtatcagagaatttgcaaaatggtatcttgcaatttcttagaggtttacctttccatgtggttgaggcaacatccgtcagtacctttgttttttttttttttttggccgcgagccgttttattatattatatcgatcaagataaagacgaaatggagtggaggcctcgatcacatttccagactggtagttgaagactctcgtaaaacaaaaaaagaacgagaacaacaagggtagagagttggctaagcccagacgtgcttctcatgctctgctacatccttgaaataccgtggggggtttcccgtcacttccaccacagaattgttgagaacttcttgtgggccattcttgacatcaacttccatggccgaaagcatagctgcaaagtctgcaggtatccctgccttttttactaaaagttcagcaagtccagtttctgtaaggctgcggtggatgatttttttgcccaaaattgtggtgagaatctccgccacctatgtattattagcgtcaaaaggatttatctacaggtattgagttgggatagagtcatcttacctgcccatacgataggagctctggacctaaaatgacatattccgtcttgtgcgatccccactcagtcaagcaatgaaaggcaacggaagcaatgtcgtcggctgagacgaatggaatcttaccatctccagtcgcggttatgatttgattttcgttcttaatccactcgcgagagggatcttctaatagattctctagaattgaaatcaagcttagccatattatcgtttaagattatagcgtagaaaaggataaatcgtacccataaaccatgttggtcgtagtgccacatactcaacttctgccagagagtccagatatgcatggacctgtcccatcgagtgtccacctttctcaacagtactggcgctgagaaggacaaatctttgaacccctttagcgcgagctagatcaacgaattcgatcataggcggggctatatccatgacaggaggcccaactagataaatggacgagattgtacccaatccatgcttcccggcctgttcgaatggtctctcccacgtatctcttttcagccagttgaactggctggatttataggggtcagagggagacgccgagctagatccaactagaaatggagttttggcttggtccagaagtgccgcaagacgactggccgttttaccccgcccacccagtacaagaatagtcatcacgaaagattcttgggtgcaagtttgcaaggaagacggtttgtattacttccatcgaacttcagcggtgggggtatatatgttaacttcatttacgtcgaacaacaagaatccagcagaccgcttatgttaaccgaaacgcaagatatgactacacgtattaccctataattgaaaatggcatatccaagaacagaaaccgatcttccttgctttagccttccaggatcatggtctcgtggatattggcagtgcccccgaggtgggccgagaaggggttgcatcaaatatacgcgtcctgtcgctgtgccctgatacagcccagcgcccactggggctgacggacattgatgcccaattttgaagatcgttctaagtgcagcaccagtgcatcatggattctaaccttggaatatcggttctcgactacctctgtaagaatatataatgagcaaggggcttattgcagtttccaatctccttttttccatcactaaatacatctcgataatttgagacctgtcacataccgtatccattgtcgaaagtgttgtttcgtttaccgcatgcaacgactgatcctccgaatactgtgaaatgaccgtttacgtagacccatcaaaaagtgcagcaatgtcatcttcataaagctgcagagtgggtaccctagctagtgtccccttaatagtccggacaaatggcttgtccttccgagcaattattgtcagtttcggttccagtttgaggagactcgaatcgctgattctggaaaggtacggttctaagctctcaaagaaagaacgccgcccgctttccgtgtcgacattgaccccgtttgtaatctcaaggagaaggaccagatcggagtacccgttgcctcctatcaaagcagcctctacacgcgggtgttgctcaatctcccgctcaaaaggagagacaaagtatcccttcgcatcggtgagggaaacgaagtcatccatccggcagacaatcttccagagccctttacgagtaggatgctgaacccacaaatccttggtctcaaatctctctagctcaggaaaggcaataaatatcggctgcatgacgcattctggtcgacggacaaacaccatttcataaaagtcatcagcccgatgctcaaactcgacgcctgcatgtggctggaacttgaagtaatcccagtcctctttgtcgtccggccgtgtctcggtgaaatgatgtcctgactcggtacagccaataagaggggctaacttggtgtcagagattatttgattccccaggtggcgcgccagaggagcgccggcatagtggacatattccaggcttttcaaagcttctgcgccatccgtgaaagacaacatctgactcaacagtagcggtgtgcatatagcaccgtccgcgcgggcatagcgcaagatcttcgccacgttttctggggattggtcgggaggtggaaggatggctgtcatgttgacgaatggggggatgaagagtaccgttaccatccccacatactaccacggcgttgttagtacacgagacaaatgctattaaaccagacagagctcaaaactcacatgcaatgttggcaagtgtgtataccatcgtttgttagcgtattgatgaatatggctctctgcgacatctggcaagcttgctggagcttctagattggccaccattcgaaatgtatgggtgattggcttaggagggcctaggtgaatatttattgtgattaggcggtccctctcttgatgaacgaaagaaaattggctcacctgttgtgccagagctgtgaaatactagccatgggtcatccttcgcgtcatcccagggcttggtgtattcaattgcaatcggctccgtgtctcggaataagtcatcgagacttggggcatccatgtattgaatttctggtgcatgctcaagggctgctttgatgtcattggctacatgctttgtacttaggtagacttcacactctgcttttcgaagcacgtgtgcatgattttctggcatcatagacaggttaggaagaatcaacttggaattctgttagccgggaaaaagaaacgggaaatcatagacataccttcttctgtaactttcctgctgcgagagcaagaattggatagcgaagatctttgggtccggcatatgcaaaacattgaaaagaccgcgaagatggaggcagattgtgcaaaagccactgtgccgcatgattggccgcatcgttcaattgtttgaacgtgatatctctatacccttcgcacacttttccttcgtcaaccgggatcgaaatccacgaactgtttggttcgtcacgcgctcgctgttcaatcacagatataatgatgcgctttccatgctggacgccgggaaaaggcagatgcgtagactttgcggacattttaggttttctggcgcagacaatgaatggaaagtgcgctgcttaatttaaagcttccacaaccactagcttaggtccgacgatcgacattattgcgtcctagctacctaaatcagggagcgatcttgcatgaaccaagaccctcatcgcgatacaatctggtttttcttttgaaccattgcatcatcgtatgtattaggtgggctgaaattctggagccaacttgccgatcgcgttcccgtcggcccttcccatcttcgcaatactagatgcgccgtgagatatcaagcccatcttatgcaagaattaattattgaacttcgtcttgatccgcctttgaaacaatcgctagtcatgggactggaattcggacgaaatgagatgtgttccctttaactgcaggtgtctaaatttagaggtaaaaggattgacagtaatcgaggaaacgatctgcggtgttcgtgtgtgttcgtgtcgatggttaccttcagtggtatgaaatggtggaccaatttcagcacgtgatctgactaatataaagtagcccagtcacgtggtgatcggcactaaatcacgtgcatctggatcctcagcggcctctaagatagaattcaaagtctctctctatgacaacgaataacatctctaattatcaatttcctctatctctaaaaagaagccgaaaccttaaaacagccatacggagtactaactatggtgatccccatctaacgtctatcatccggtcgtcgccgcttaaggcacctcggctgcaggcggctacatacggctccagacggcctcggccggtttcgggtggcttcaggtgttagttttctccgtgataggaaaccttgttttcgcaatggaagaatagccactacttgtggcttgcctttctactcctactattctcccctttcgctcttacacctcttcaagtctcttccaccttcctgacattgctcatttactcaactcgactgcaaccatggacataactggaatgtggtgaagctaggccacttcgatagcctgaaaatcggggcgttttgccacttcgagaaagcaattataagcgtgcgctaagcctttttggcaattccgtattgaattcttggcatatttccacatgataacaagccattcctaggctcctaaaaggaaacgaggccctatcgaggtaatgcgtataggcagttggacccgtactaggagtccggagagttttaagccgggatgtacatatgcgaggtatcgaattcccgagagaattcttgaccacttaaagacatgtagctggctataaggggaatcctcagtaaacaaacaacacatctcagcactttacactcaccagtgagagtttggataagacactaatgctcgttctcacctatgccagaaaggtatcgatattctcgtgcatgtcttcatcttctgttatatcagtagctcaggggaagaatgatcgtgttagtcttgctgcagcctgaaaggggtgatgggtcacgtggtgattgtatggcgacatcttcgttcagtttgatattcacatctgaaattatgacaccacaagaaggggcgagtgcgtaatagatagggagagaagaaggatgagagcgggtgaaattatccacaacagtcgcgcactgaccctctctgttgattgccagatacactcattcgcttggcatctgcacagaacaacctctcagcccagccgcggaggtgggttaatgctgccttcttatgtcatcagtagtggcatctcacaacgtagtcaagggttgatatatccttccaactgaagaccttttttgtatacaacgagctacaatatacaaagtttccccatgatggagcgcgggcggggcctcctttgaccctacggtctagagcatcacagcataaaaccggagctagaggtgacccgttgcggctaaacatgcacattactgtccctcttgactacgtaaggccatcaaatacaatgaataagaccaaagcaaatatggacagccctacattacgattcatttatccattacggagtcttagccgcaggttcagctggtggaaactaatcagtggctcactaatccgatggtttgatccaacggggcgcaaaatgtgttctaacggggcgtaaaatggtcagagaaactgctcgagcgcgggaatcaaaggagtcgccgtcttggcgaatgcggttatctcatctcctggccaatggtgagagacaatacaagccgacgttgcctccagagctattcgcggcattgcatgataaagataacaaagataaggaagccaattcgacccaatgatggcatatttcccggggccccgacgtcttccttcaggtgtacctcatcaacgtcgccgatccgagcaataggcaaccagttccttctgttgataggacagcacgtcgaactcctctcccgtagccaatcgccaccagaccaagagatatacttcggatcctccgtttaggggggggggcatgtacttttggctttctatagttcgccacttggcagtttcaactcgatcgaaacctgataacgttagaatataaattgcaatgtccccagatcttctctcggggcattcgttgcaacagcgatctttttcatccttaccttctatctctcatctcgggtctcgcacccattgacacgatgtcgggagttgaaaagcctttaagcgacaccaaaggtgtcccaagcaaagatgccgaggagacaattgtaggagaaatctatgaggatggcgtcgaccatggcgcagactctgggctccaacgccagctgagctctcgacatatcagtatgattggtcttgcttcgtccattggtatgggcctttggctaggatcaggaacatctttgaaaaatgccggtccggctggtattttcttgggatatatcctatctggcaccatcatttggagtgtcagtcagagtataggagaaatggcgatcatgtatccccttcctagtgctgtgagtttggtggcttctctcttgccgactgatcattactgacccggccccgctagttcgtgcaatggactaatatattcgtcgatgaatccgccggtttcgcgctcggttgggcttactggttctcttactggatcaccattgccaacgaggtacaaggagctatcacagtactcaacttctggacaagtgccgtcccaactgccgctttgatcactatattctggttcgttattgtcctgatgaatgttggagcggtcaaatggttcgccgagatcgaagtcgtggctgccgcaatcaagttcggtttcatcttcgttgtaatcatctccggcattgttctttccgctggcggtgggcccaagggaggttatccggcgagaccgggaggcactattggcttccagttttggaacgagatggcgtttatcaatggtttcaaggggttcatctcggttatgccgacatgtatcttcgccttgtctggatcagaaaatgctggtctagtcgccgcagagaccagcaatccccttcgatctgtgcccaaggctgtcaagtcgatctgggtgagattgagcttgttctacatcctaggaagtttgatcgtcacgatcaacgtcagcccaaaggacgaaaatctgttcggtgcatctggcaccaattccagtcccttcgtcatcatgtataggaactctggagtggctccgctagctcatattatgaacgctgtcattctcgtctctgtcctctccactggtggtatctctggatacgctgggtcccgagtactcgttggtctcgcacaacttcgcatggcccccaaggttagtctggttcttttaccccgtccgagagtactgctgacaaaatgcgaattttccgtgtaggttctacagaagaccgatagctggggtcgtccatggtggggccttgcgcctactctcatcatcggaggtgggctggcctacctgaacgtcagcaacggtggtgctaccgtttttggctggttctccaacctgacctctctattcactctcttcggatggggcatgatctgcctgtcacatatccgtatgcgtgctgcctggaaagttcaaggccgctctgtcgaagaacttccttggaaatcaaaggtcttcccttgggctgcctattggggcctgttttggtgtgtagcacttatcatcatcgagttctatctggccgtgtcgcccttgggtgacaaacccagtgcggagaacttcttcgccaattacctctctgtggtggctattatcattctttatattggcgcaaagattttctaccgcggtagaagatggaacaaactcgaagatatcaaccttgatgcttgtaggaggttctatgcaccacgggatgaggaggggaagaatgagaagagcttcgccaagaagtggctcaagtttccaaccaagaactgaccagcctatgggaggttatgtataaatccactccattgttgggtattttagtcagatttcaactttccaaatacatatgttgtatattttactgaactacttccgtttcatcctccacctaatttattttggggattgaaccaccaacccccctttttgttaattcgaccccgcctgcgccatatctcaggcataaactgaccgcctactagaactgttcaccgccttcctggccgctatgcctacgatttgtatgtttgcttgcttattgctgtttgtatgtttgctagatttctcagcgagaagttcgaagcttacaacgtttgcaaagggtcaaccatataagcaagccgcttcgttggtggttcaatccccaatatatattgcaagccctgttgggtaagtacgactagattgcagaatcgcctcaactgttgaatattaacaaatgttgcttcatgcacactttaaccaagaaaaacgagaattgatttcaccaataatctagttcaaatgcttaatttcgcccagctagggcaaaatccaatcagtaagaacgtattgccttactataacaagacgagttgatagcctggattatgaagaatgaagggtgaatgctacgagtactgagcgatatagggtgcacattctttattgcatcattaaagtcacaaccaaatttaaagcgttactagaccgagagccttggacggctgtgcctgtgaccccagcgagaatgccccagcttggcaacatcatttttctcgacaactgatctaatcctctgctccatccccctttgctctctcggatacatgatgaacctgacttgccctccttaattcccgatcaagtacctcagtcaaccgcccaagcagccactgaacctcactcgtttcggcaagcaaaggattctcctgatcagtccaactccattcccgtgctgcttgcgcctgtccatcattggcttcatctccaagaaccttgggtttattatctccttcaatcaggctcatataatattcccattctagataatcgaatttccgggatggagtgttgctggcgtactcaataattttgcgtagctctcggaagagtaggtagatgtactggtggatgttttcggcttgcttttcttccttgttgttcttgaagtcgaagtcgttgccgttctctttattgggatcttgattttggctgaattgtgcgtgctgttgtgcaccttctttttcgcccgtcgtttcctccatccaccatctgacccaggagatgtgagtcagtgtcttaagcctgtccacgaaggagtggtcacccggtagaatagtgagctcgccaatgaatagcgtaacgtcacgaataaatcggatgacggtatcgccaatattggagatgagaatagtaatcgtaggaacggcaagcagggaccaaaaaacgaagaaggatttacccaaactactgatcggatacaaatctccataaccaactgtcagaagacttgtatatgcaaagtatagagcctcaaagtacgaccattttgcgttcgactccgagcgccagaaaacgacacctccgatcagccatatcgtcatccaaagcaaaaaagaaagcaagagcgagagccatttgtgttggacgtttgccagcttacatacctgacgcatggctataaactctcgtttgcgctgctcccgctcgctgcggccttccgctttggcactcttcttcccgagcgaggggataatacccttagcaccagaacggtccgagaaggcttctctgagtaggtatttgcgcgtttgtgctgtcaacatgttgccaatcttttgcttgccattttccaacataagcgtacggatggaggatatgataagaccaaggataatgattcctccgattgcatatgggaaaagcaaaccccggccgagatgcgtacttggcgagaaattacccacgccgatggtgagcaatgtatagtctgcaaaatatactgcgtctaggaagcgccatccctcgaccttagagtagacggctgcaccgcccagaagatagaagcagaaaatgatagtttgcagcatgagtgttcgttggctcgtagtcagattgaattttcggctagagtagccacggtaggcaccatatccagtcactgccattaatgacgcgatgatgaaatataaccctgctgcgaatgtgccatagtaataactctgcgagtagattcgaccgttgttctcgggcttgtacatgttcacgccgaagggaattaagattgcgatcaagaacgccgatgagatgtaccaccctacgacgatgattggctgggcgatttcgaaacggatgcgtcgggccatggtaagcgagagggctaggttggcgacaagtgcaaagacaagtgatattgcgttgatagcggtgaccctgcaaccgcatatgaggttaccgggagaatcattcagggtatgtctgatcatattaattaccattttggatccgggatatctgtcccaccgctgctggtgaggtccattcgccatggttgtgataaagaacagatattgaaagcgctagccatcggcccgaaagtgccctgaaaagaataatgagaatgtggacttccaaagtaaaggatgacatagtaggtttctgcatacagctactagagggtatgccgtacttgcgagccaccaacgcgcagcttgctggtactcggtatcatgttgcgacaacttattgatttcgtctatcttctgatttggagagctggcggtgcggtcgagagccactgcttcgtcggcaatggcgtcatcgaaaccaggttcgttcatttcgtgcgtgcttgatacaagggaacctcgtgtactctgccgtttgatcacgacctcgcagctggaatacggaggatgggaagcagctagaattccaggtagaaaagaattctaggtagaaaggagagacagtggggacagacatcatatgcataattgacttcattggcgcattcaaagaccaagcaaggcttgtcgcaagcctagtgacgggatgtccgctatgattggtcgacaatgcggaggggaccgaataaaaagcaagatctgtcgacgtcataccacgtggcttccatgttttggcaattaccacggaacttctattttccgcagatcaacgagaagcttggttagggatattaggatcaacctcacaaacatgagtgttcggtcgacaatgatgacaagcacttcatccggtccgcaccaagctataatatgccgtacacacagtgcaattattccaagtttcttataattagagatactttcaccctacaaattcagaatttgctttaaaagcccttgcagctcttcagccttcgcacgtagtcctccacttagccccgcttccattaccatgccagtgccgacattccttccaaacatggactctataatgctatcgttggagctttgaatatgttctataatcttgtcagtcacgagtatgtggcaagaatacaagtcacataccgagatccttctcaatcgcatccaacgcatccagtaatatctgcacggcattgagaatccgcacgcacccgtcattcgttagaggtagatcacccagtcgcaggtcccaccgtagcccagctcgggatgatgttgacgatgtcgagtctggaagtatggtaaatagctgacgcaggtcgtggaacactatgtcatagatgttcaatagcgacatgtagcatgacaacatcattaagagggtgggtgtgtccacaaagtcatggctaccggggttgaaactgggaagcccggtccgcatccatttctgtcgggatacgatttctcgtagccattgcgcgagataggttgctccgccaatcgggtagtcgtagatgctgctactgctgtgctttctgtcgatgtttgctctgcggtaccgttgcaggtcgcttgtgtagtttgtcattgcgacagggatcaaagagaggccttggacttgggtggatggtattcggacttgggagttcgggttgtcgggcatggtgctgtccgtgtttggtatgttgagtatttctcttatgtgatttgtgtcggcttggttatagtatgtctggtctaacgagttgcttgattttgtaagatcgagctctgggctcggcgactcgggagagcaccaccattctgtctttcggacagggaatggcatacaaattggcatgactatctggtctcccggggtgtggaataacatatccgccagaatcgggtccagcgatggatcggccaggttgtgcgggtcggcgatgggatcgacacgggagatcgatggtaaaggatcgtcctgcgatgcaagaaagccgggagacttcaatggtggcgtcgatgcgtttgattctgatgagtatgtggaaggaatctcttccgtcctgtcgagcttcttgggctgccgcccactgcgagcccgccgactgaaaacgcatggcacccgagcgcgcgagcaccgttggcacgtgttaagccattcaccgtcagacgatggcacgcaccgcagtttctgtaatcgacatcgatcgcacgatgtgcggtacgactgtgtgggtttggcggaggctgacatattgatcgtagggctggtaaggctaataaggctggtcaagctcacgataccaatgcttggctgttctgatcgtcgtcaagatgtgatagcagtgcgtgatctgacgacttggctaaaattggcattgattgaaatcttaagattttccgtgtcggtgggtcagatccggttcttgtatatatgtttggattcgaagtggaggacagcctggaacccaaaataagaacggaccatggcattcagctgtgtagcgctggacagaacgcccctgcatggcgctatgaatatcgattccatagccaatctatttacaagaatcgccaaggcgctgctgtgatccttctgagtggggctaatttggctgcaggcgggatcacacgtcaggtcgcttgcagtggtttggtccaagccgcgtctgcgggtctctctcgctgtgtatataggctgttgagcatgtcttgaacagttcagcatgtaagcgacaacgtttctgatgtatgaatgtcgcaaggggaagaatatcctccagctgtgcgctcgaacggaacaagaaaatggcagcgatatcgctccgataggtttgacacttatgcagacttctacttcggtgatatggatatcgggacgggtgccgtcggctctccgagagggttcagaagtcagcagataccgaatcactctgacgaagtgaatgcctttaacccgatcggtatccttctcgcgagatacctctggccacgtgggtttagccatctgggcgcatactattcgggccaataaggctggcaggtgaaacgcacgcccagggatcattgccgttgttatgccgtgcgccatagtggcatgagcgggtcagcggaagaaggcgcaacggcatcccctgcttggccccagcccttcatggttacttcgcgtcttgaataatttcttctttcatcttgttacgaggacaaaacaaccaatcgtattgccaacagattggcgtatcatagcattatctttaaatatcttgcacaatattcacagcgtgactgtcgtccgactccggagccattctccgtaacggtaaaacagaatcggcactggcgcaaatgccagcgccagaaaccctagcagcgtattaccccacccgtagttgagtgccgaatacatatgcgacccggcaagcggcaagaaggccccgaacattgagcgaaggagaatgttggcccctagcgcagatgccgccgcttctgacccgaatagatcgaccagatacagctgggagggcatgatcacgaagaaggctccaaacccaacgatgaacgttccaaatatcggagccatccaatgcacctggtgatatgccgtccagccgtaaatgaacaacccaggaccaatgactggcgggaaccacatcatcaggaccagccggtactcgggcttaggttcctgaacattgtctactgccattttgctcttcaagatccggtcgcttagtatgccaaatgtaactagccccacgagttcgccaatacctaggccgaggtaggccagaccagaaatgccggcgctgaatccgtactgaccttcaaagaccatgctaaaggtggcaaaaaggagatatagaagtccgaatatgagagccacgtagatggacatgacaagcacgatcggcgaaaagatcaagagtttggtggggcgtacgagtgcagcgacaatgatctgctgctttgtaagaccgcgatcgagttttgatcggaggtgaaggttcccggttgtgcgtcgcaagtatgcggccttccgttccaatagggtgttaggatgtgtttcgcgcatgaagatgagcgttccgatacccgctgctcctccctgtcatagtgttagaatgctaaatactagatcagaacaagaccgcttacgaggatcgcgaccacccagaaggtccaccgccaatccttcccttcggcaacgaagcccccaatcaccggtcctagaacctaggtcagttagtatatttcgactacatagtagatgcaagttacataccggtcccagaagcgggcccagaccaaacaaggctgctgccgcaccgcgtttctcgatcgggatgacatcggcgatcgttccaccgcccagggaaagtggcgccgctcccgcgcagccagatagaaaccggaagaccagaaattgagcgggagtttgactcacggcgcaggcgacaacaaaaatgacgaagagagtattggaaatgtgatagacgacaaggcgcccgtacatctcagagagcgaggagatgacgaggggacccaatgcaaaccctagcagataaatactgacggcgaaggttgccaatgtcatattggtgatctccaggtccctggcgacgccctccattgccggagcgaccatggttgaggcgatgttgctagtaacttaattagcatggtcggttgtttttgtctcacccaggaaacgacttacacgaccatggacaagatggccacaatcacgacatgaccaaagcccttggtggcaggccagttgagggggtttttagggtcatctgggccgtcccagtcgaccacatcgtcctgcagtttatgcgacggcagcttggcagcctcctcgtctgccttcagctcgacatcaatccgagtccgctcggtctcatcattactagagaggttcatcctacagagtgtactcggtagtgggaccaaagggaatttgtcgtttaggacaagctttgcgcctatataataatagagaacgctcccaataattgcaaacggagatggatggaagattttctcggggattcaagtccatgggcgttggttacatgtcgtttcctccgtgttgtaaaggccgagctggcttgaagccaggaccagggctcggagattccatgactactcaaattgggtattctcagcgagaggcaaactattggatggtggtggaacgagtaacggagcggaggaatagacggagatagagagtcgtatatggaggaatccaagggaaggagagcaagacggaggaatgcacggcccttggaggcacatccatggatatgacaagttcgtccgattggtcagaatcctcgggagctgttgatcctccgcatattacccgcgccttacccgatatggttaggccatagcggacctcgggcgaatgtttacggcttccctttcgttccttgtcaatcaccatcggacaatccgagtacccctccatctgccatcattctcgtattgatgcatgctcacagctcctgatctttttatctattggctctgaatttcttccttagtctctatgtggcgatacaatcctctacggcgaaaacataccccacccattcccccacacgtgtgatggagaaccttgaccaggcgccgcctcgtttagtctaaacgacctgtgtgcagaggagtggtctggcccagcatatcacatatattcatacggtcgcatagctggaaaacgtgcacctgcatatccgcgacagccacaatggatcctccgcccgcagacgaacccaacccccaaccggcttccattaatcgtcggagcaaaccccagctctcttgtaatttatgtcgtcggaggaagtgagtgccaaacatctccgactttccgaatcaaatctgacagaattctccgataggctccgatgcgaccgcaaccagccttgtttgacatgcaccgctcgtggattggcactatcgtgtgcctatcccaataatcaagctccacaatcgcctagaccacatggggcccacagggctcgcccccaagcaaccgtccaggaccgtttgggtcagctagagcagattgtcgtttcgctgatgcagaagaccaccgatggccaagatcgaccggaccagcatccagtcgcatcagctccacaagatggcccccaagaagactcgccgggactggccattaatactgcagactctccagctcagtccgatggcggaagtgtatggtttagctcttcggacgcccagtatgtcggaggaacccactgggccgccatcctggatgggatcgccgacatcaaggagcagcttgaacaagaagattatgggaacaccgagaagcctgccatgctgcatacctttctgctgtatggatgtaaatcagcgagtaaagaagatatcttggcagccctgcccgatagacccgctgttgatcgctacatttcccagtactttaatcgattggacttggcgccatgtaagcccctgccatccgatatgcgaacaatgactaatacaggcattatactattcagcctgtctacacagtggtcagttttcacgcgaggtatgcgaaagagtttgccaaatagcgtgagtagaatgtggttctaacgacaataatgtagtatgaacggttctgggagaatcaagctcagacctcgatcatgtggctgggtctccttttctctatgatatgtctcgcagtgctggcttcaagtgcggcagactccagctcatccccaggagtccgcaatccgttggtggatacgtaccgcgaaaagatagtacaatgtctcattttgggcgagtacacaaaatctgggcgttacatatttgaaaccctatatcactacctgactatcgagtattccatccgaaaggatgccgaccgggacatctggatcctctcgggaatctcggtcaatatagctctgcgcatgggttaccaccgggatccatcgcacttgccaggaatctctccattcacaggagagatgcgacggcgggcctgggccactatcgtgcagggagatatcctgatatccacccagatgggcatgccacgcatgatcaaggactggcaatgtgataccgtagagccccgtaatctgaatgactcggacttccatgaggattgcaccgagcttcccccgtccaggccagagacggaaatcactacggtttcgcacctggtcgctcggtggcgtatctttgccgccttgggttcgattgtggatttcaccgcgtcggtgcggccggtggcctacgatgaggtgatgcgactagatcgcattctgcgtgacgcggaggcgacagtccctgcctacctccgcatgaagggcatggccgcggcggtgaccgatcccccgcaagtgattatgcatcggctcttcctcagactgatgttccacaagggtcagatcatgctacactgcaagtatttaaccccagacccatccgcatcttccaatgacccagtatcatactcctactcgcgtacctcttgcatagaggcagccttgggtattttggagattcagcgaatactcgacgaggaaaccaaccctgatggtcagctttatatgatgcgatggcgggcttcctccttcataaagcatgagtttctgacagccacgatgctactgtgctttctcgcgcgacagagcaatggtagcccgaatgctttgaccgatggccacgacttaaaccaaatcatggcagcgctaacaagcgcacatggtatctggatacggtcaaggaattcatcggtggaagcaaagacagcagcagacactctcagcattgtcctgggcatacactcgggtgattccaatatgggcgctgagggccaggctatgaacaataatttctccctgaattcaggtcagtcggccgtctttgtttctctagccagtccttgcttacgatagctcagccctaccgatacccttccccgctggaggtttcaatggaaacggtctggaagagaacctttattatgggttccctttcatggggtccaatcagatgttcccaggctcaaccctcatgatggatccgaatctcgcatggcaatggtaaaaggtgtgttacgactacaatgctccccgccacatctcactgacaagaacatagtattttgaaacggattacggcaggatagagtttggagttcggcgtgttgttgtattcggaatttttcggtggaatatcaccttagtgctgatctgtccaagcctcgatgagacgatcagtataccacgaagacaatgaaacctgcgtatataatgaacaaacttcctcgatgtcaatcaaatacgtcaacaatcatcttgtattctcagagctcctccctttcttcaacacggattaattgaaagacctgccccctatgcctgaaccaattgccatcatcggaaccgcctgtcgctttcccggcgggtgcgatagccccagcaaactctgggggctattgagaaaccctcacgacattgccaaaaaggttcctctggagcgcttcaatgttgataatttctaccaccccgaggcaactcaccatggcaccacgaacgctaccaagtcctactttcttgaggagaacatcgctcagttcgatgcgccgttcttcaatatacaaccgatggagagcgatgctgttgatccgcagcaacgtctactcctagagactgtgtatgactccctgtgcaccgcgggtctgcccatggagaacctccgcggctcgtctacggctgtctacgttggtatgatgtgcgatgattggtccaccatggtggcgagcgatgtcgagaccttgccaacctatacggctaccggcttagctcgaagtattgtgtccaaccggatctcgtatgtctttgactggcatggcccttcgatgaccatcgatacggcatgctcgtcgagtcttgttgccgtgcaccacgccgtgcagaccttgcgtagtggtgaatcttccttggccatagccgctggaaccaacttgattctaagtcctagtgagtacagactcccgaattgaccgagttgccactgatctctcaagccatgtacgtaaccgagacgaacctgcgaatgttgtcgccgaatggacggtgcgcgatgtgggatcgggctgccgatggctatgctcgtggcgagggagtcgccgctgtagtcttaaagaccttgagccgagctctggccgatggagaccacatagagtgcatcattcgtgagactggagtgaatcaggatggtcgcactaccggactcaccatgccgagtaacaccgcgcaaacggcgttaatccgcgacacgtaccgccgagcggggctggacatcaatgaacctcacgatcgccctcaattcttccatgcccacggaactggcacccaggccggtgaccctcaagaagcggaggctgtctcggcagctctatttcccaatgactcgaaggaccacacagagctctttgtggggtcaatcaagactgtgattgggcacactgaaggctctgctggtctggcctctttgattgggtcctcactggctatgaagcatggaatcgtaccgcctaatcttcactttagcgaattgagcgacaaagtcgcgccgttttatacgaatctgaagatcccaacagagcccatgccttggccgaagctggctcccggtcaagtcaaacgggccagtatcaatagttttggtgaggcgatttctctcgatatcatgttacttgctaactcttgtaggttttggtggaaccaatgcccacgccatcatcgagagtctcgagcaagattccgaaagaacattgaagcttcgttcggtcgcaaatatcactccactggttttttctgcagcttccgaaaagagccttcggaatatgctcgccacgtattcagtctacctgtccgccaaccctacgttagatctccatgatctggccagtacgctcagcatgcgccgatcgacactaccctttcgaacttacgttccagtccgtagcaaggaagggctacccaagcagttgaagaccatggcggatgccgccccaaatgagtcggagctcagcgttcgccgctctcagatcattaacccagctattcttggcgtgttcaccgggcagggagcgcagtggccacggatgggagcgtgtctcatcgagacctcaattttcgcccaacagaaaattgcctggctcgactcaattcttcaaaccttacctgcagaggaccgcccgacctggacgatcaaggagcagctgcttgctggtagcgagacttcccgggtgacagaagcggcagtatcgcagcccctgtgccttgctattcaggtggtattggttgatatcctccacgctgcgggcgttacattcaaagctgtcgtgggccactcatccggtgagatcggagctgcgtacgctgcgggtctcctgtcggccgaggatgccgttaggatcgcatactaccgtggcctgcacgcaaaacatgcatcatcaccgaacggcgagaagggtgccatgatggctgttggcgcttcgcatgtagaagccctggacatgtgcgccgactcacgcttcaaaggccgcattcaggtcgcggcagtgaattctagctccagtattacaatttcaggtgacgaaggcactattgatgagctccttgaggtactcaaagccgagcagaggtttgcgaggaagctgaaggttgacaccgcctatcactcggcgcacatgctaccctgtgcagagccttacttggagtccatgaagtcgtgcggaatacagccagaagaccggacagggcctgtatggctttctagtgttaccgagggacagagaatggccaaggaaattctcactgaaagctactgggttgataacatgtgcaacacggtattattctctggcgcagtggctcaggctgttttggaggctgggccattcgacatgaccattgaaatcggtccgcacccggcactcaagggtccggtaacatcgacgcttgaggagtttggatgtgaagccccctacacaggtctgctatcccgagccaaaaacgatgttcacgaactatccgcaaacctcggtttcatctggatgcatcttgggtccggcagcattcagtttgacactgtcgacaagcttctatctgggttcaaaggaaacagggaagtcctcaccaacttgccgtcatatcccttcgaccatcagcgtgaatactggactgggtcccgcgtgtctaatcaccacaaatttcgtcgaacccctccaaacccactgctcgggacgcaatgttccgaagcgaacactgcccatgagattcaatggagaaatatccttcgcccgagcgagatctcttggctcagtgggcatcgtctgcagggtcaagtggttttcccagccacgggttacgtctctatggccattgaagcgacgaagcagctcactattcagaatcatattacttgcatcaagatttacgatctggaaataggtcgcgcaattgctttcggcgatgatgcagccagtatcgaggtcgtctttaatgcaagcgtggtcgagataaccgagaaagccatcaccgcccagttcgcttgttactcaatttccaatgccgatggaaatgcagtcctgaatgcgaaaggcaaggtcattgcagatttgggtagctctagtccagggacacttgcaagttacgagtccaaccctttcaatctggtcaatgttgacccaactgagttttaccggtacctcactaagattggctatgattactccgagcccttccaaggcgtgtcgcagattcaccgcaagcctggatatgctatcggtctgatcgaggaccagtctggcctctcatgggaggataatctcacatttcatccgggagtccttgatactgctctacaaaccgctttcgcggcatggtcctttcctggtgatggtcagatctggtcccttcatgttcccactcggtttgagtcgctagttttcaaccctcacttctcccctcttgccctaggcaaagaacgctccttcaaatacgaaacattcattcgcactaatacccaaggaagcctgactgccgatattcacttgtacaccgcagatggcaagaactcatgcatccagattgaaggtgcatcccttgttccattctcaccgggctctcctaaagacgatctgccactcttttcaagtttcaagatgagacctgctgttcctgatgggcaacttgcggcaatgggcgagacgatttcaccctacgaagcgcaggtttacaaggacattgatcgtgtcgctttctggtatatccgaaatgtggcccagactattaccccagaagagtgtgatcagattctgccccatttcagatactatctgcggtggtgtgagcgcatgattggcatggtctctcggggtgaacatcccaaggtccccgttgaatgtcttaatgatgagagaaaagacatcactgaagtgttgagcaagtaagttcatgacttttatttcaccccaattcttcttctgcgcaatctcgaatagattattgattgtcttgcattaggtatgagggccgcaaagatatccgatttgttgaggtggtcggcgaccaccttgttgaagtcgtccgcagtggcactagcatgctagagtatatgaaccaggatgggctgatgctcgcggtttacgaaaatggtctggcagccgggccaaacaaccgctggctgagtcgcatcgtcgcccaaattgcgcatcgctatccgggaatgcatattttcgagatcggtcagtcttgatgcttcatattacattagctttcagcgcacaagctgactttctgtaggagccggaacgggcgcatccaccaagacaattttgcccgaagtcggctcagcctttggaacgtatactttcactgacgtgtctagtggtttcttccctgaagctgaggagcgcttcaaggactatgccaaccgtatgatcttcaagacgttcaacactgagttcccgccaagcgatcagggattcactgaaggccagtacgatgtggttattgctgcaaatgttcttcatgtctcggccgacatggagcgatccatgacaaatgtccgccgactattgaaacccggtggttacttgattaccttagaggtgacaaattgtgaccttctcttcagcggtatgaccgtgggaactctcccaggttggtgggtggctgcggagactggacgaccgtggggtccttgcttgacgctgcctcagtgggactctgtactccggcaaacaggcttctcgggcattgatactatgacacccgatctcagtgtatctcttcccgtcgcggtctttgtttcccaggccattgatgatcgagttgctctccttcgagaccctctttcattgtcgaccgaggataatttgggcactctggtcatcatcggcggcacgacgctaccagtcttcggtattgtggaagatgttgtgactaatctatcctctatatttgctgaggtcatgctgtttgagactgttgaagagttggcaatctttggctccgcggtacctaatggggccagcattctctgtctaactgatctcgatgaaccatttatgaagacattgacgccgcagaagtttaccagcttacagaaaatgttcgacgtggcgggaaccttggtgttggtttctcgtggctgcagagcagatgaaccatattccatgatgcttgtgggcatcgggcggacagtcaagaccgaaaatccgaaaatcaaccttcaactacttgacattgaagccgttgaggacacaacggccaacatgctgtctgaagctctgcttagacaccatcttctgaggcaatggcagtctaggaaagaaccccttctctggtcctcagagccggaggttgttatgcaagacagacgcgcactcattccgaggctcttgcccagcacagacaagaatcagcgttacaactcccagagacgcgctataaccaaggaggtcgaccctagacaggcaaccatacagatgatccagaatggagtcacattcgacgtcaatgatgtttcgccactgctaatttccgatgcaccatcgtcgaaatccattacagttcgcagcattctttcctcattccagtctctcaaaattggaagcgccggtttcctccgtctcatctacggtgtgacttcttcgtctgagacagttgtcgccctttcatgctccactcagtccccagcagttgtaccatccaagtggtgtgtaccaattgcaggccatgctatgggtcatagcccatcatcactccttacaactttggctgccaatatcatggcgaaggaggttctgagctctgtgccggatggtggagttcttctgatacgggaggcagatgagcctttcaagtcttatcttttgcacatggcaaaagaattgagtgtcagaacggtttttgttaccagtcagggcaacacgggtacccctgacagcttctatatccaccccagactttcgcagcataaattgaagcagctccttcctgcagatgttgccgtctacgctgatctatcccagggggctggagcagatgatttatcagaactacttgataagtgtctcccatctcaatgcgtccatatcaaacgaagctctcttctcaataatgatatcactgatcctcatccccgtttttgtgacatgatcagtcaacttcttcagcaaacaattgaaacttccacgcattctgcaagaactatcaccattccgcttagcagagtgtccgatcattctgtgtttgagccttttaccgtggttgactggtcaattcaatccgttccggtcaaagttcagccaatcgattctggcatcatcttcaggccggatcgaacatacttcttcgttggtctagctggcgagctgggtcagtccttgtgccaatggatgatttctcatggagccaagtattttgtcttgagtagtcggtctccaaaggtcaacccgaattttattgaggggatggcgcagcagggagcgacagtcagaacattgccgttgtcagtaaatttgctccaacttttacctcaccgactaacaaaacccagagatattacaagccgaaggtccctttggtcctgctaccgagagatcagccgcaccatgcccgccgttggcggcgtcatcaacggtgccatgatcctccaagacagcgttttcgaaaacatgacccatgaacaattcctcaaagtgatcagaccaaaggtccaaggcaccatactcttggacgaactattctatgactcacccctagaattcttcatcgtcacttcctccatcaccgcagccatcggtttcagcggacagggtaactactcggcggcgaacacgttcatgacctctctcatgtaccagcgcaagaagaggggggttcctggctcctctatggacatcccggctgttcacggtattggatatgccgcccaagaggataactttgactttgagtatttcactacactcggctacaacaatgtttctgagcaagacttctgcacactttttgcagaggctattctctccggtcgcgccgactcccttgatgaggctgaggttgtatcaggtgttaattatgtgtcgcccgacttggatatcccccagactcacaccagagatatcaaattctcccattacatcctgaccgcggaagaaggatccagcgtcagcggtagcaagtccgccgcgcaggtgagggtacagttgcagggagtgacaagcgaagaggcaatctatgatattgtcaaaggtaagtcactgattattgaacactaccgacagcttgactgatttcataacagattccttcctggtgaatctcaaaaaagttctccagatctcagctgatgatgatattgatctttcaacgcctcttgtggagcaggggctggactcacttgtggctgtaatggttcgctcgtggtttttgaaagagatcgaggtcgatattccggttctgaagatccttgacggcagctctatttctgatcttcttcaactggccgtttccaagatacctacatctatcacttgtgcagaggacccgaaaagctacactgacactccaagcccatcgttaccaacacctgccaaacccgtcttcaatagtaccatttctggaacacctagcgactctacacccagctactcaccactgctgacacctagtgaaagcgagacatcatccattgagctgctgactccagatgagccccttaaatccaaggaactaggggccacagataaactggcccgatcgcaacgggacttggtcattcagcattcccgcctcacgagagagcccatgtcctttgggcaagccagattctggttcctccatcatttcttgaagagcaaaacgtccttcaacttttcgacttctgcacgtctggtgggcccgctgcgagtgacggcctttgagcgagctttggacacagtgattcagcgacacgaaggtctacgtactagattcctctggttggatggggatattggcacacctatgcaggagattatctctcaccctctgcttaaattggagaccaagcgcatatactccgatgctgaggcagccgacgaactagagaggttgcaaaatcacgaatatgatctggaagactgggggtctatcagagcaatgcttcttattttttccgacaccgtccactacttcctccttggatgtcatcatattgccttggatggacaaagtatgcacattcttttctcggagctcgacggtttgtataacggtaaagctgttcctcgaatccccgatgcctcgcaataccgaaagtttgctaccagacagaaacaagattacgaatctgggctattgcaggctgacatcgatttcttccgtgacatcgtccgtgaggatccgggtgcgattgagccgttctcgttctcgcacctctcaaagcggaagattctagatacctaccggtgagttgacaatgaaatcgggttgattattttctgacattgttctaggcaccatcgcgcgtcgacccggctgggagccgggttagctcgcaaggtcaagcaaattgcccgcaagcttcagagcacgaattttcatttctacctgactattcttcaagcgctcgtattccgcctacttccctataccaaccaattctttgtcggaattgcggacgcgaaccgagtggataaagattcaatcaacacgatcggttgcctcgtgaatctactgccgctcaagttcaaccgggcggactcatccaaactcgatcatgccgtcaaactcacacggagcaaggtgtactctgctctccagcactcgcgagtgccattcgatgttcttgtcaatgagctcgagatcaaccgttccgccatgcacaccccaatcttccaaatcttcatggactaccggctaggcgaccacgagaactcgcggctagtcggttgcgatgccgagctttcgtggaataatgctgctacagggtatgatttgcacctggaggtgcttgatactgtcgatgaagagtcgctcgttgttttgaaagtgcaagagggtctctattccaaggaagcagcggacttgctgcttcgtgctttcaccaatctcctagaacaggccacacaaagtcctgccgatcgtatcgatctatcgtcgcctctgctgtggtctagaaaggatattgatgatgcgttagcgttgggaaagggtatgtcacacttcgaaatcagggagattacgactaatcctcctctataggtccggaactgaaccctgaatggccatcgacggtcgcacaccgcgttgatgagatggtggatgcacaccctgatgtcatagctatcaaggatggacatggacatgccctcacctatagtgccatggccgaccgcgttaacacgatcgctgctaccctccttgaatatgtctctggtggcgatagtgttgccgtgttccaagagccaagcgctgactggatctgttcgctactcgccatcttccgtgttggggcggcgtatgtccccttggatctgaagaatggtctgcaacggcttgcgggtgctgttgaagttgccagcccgcgggttatcctccacgataaattcacagaggctcgagtgccggatcttcgggtggcaagggcagctatcgtcaatgtctccgatattgacatgaaccccgatgccaaagtaccgaacagggccatggcagagtccactgcggctattctgttcactagcgggtcgacgggtgttcccaagggcatcgtactaccgcattcttgcttcgcgacgcatgtcgaagctgtcgaaaaagcctggggcgtgggcgcggcggtagtcctccaacaaattgccctcagttttgacttttccttgcatcagatcttcacggcccttgccaacgggggaaccctctttgtggtcccgtacgagaaacgcggagacccgtatgaaatcaccaagatcatgaagcaagaaggagtcacccacaccctggccaccccaaccgaatatggtatgtggttcgatgcaggggcggacattctctcccagtgctcttcctggaaatgggctcttgtcggtggcgaagccttgccaaagtcaattgttcgacgcttccgggatttgaactcgagtaatctcaagctcttcgatttctatggacctgtagaggccactattgcacttaccaaaggcgaggtcaatttcgggctcgctgatactgaacaaccaattccggttggaaggcttcttcccaactactctgtctacattctagacgaagcgctgcagcctctcccgatcggtgtcccgggggagattgttgttggcggacccggagtggcggcaggttaccttggccaagaagagctcacaaacgagaagtttatccccgtccctagctacttgcaggacgaacgctccaagaagcttggatggaacagattatatcggaccggtgaccgtggacgcctgaacaacgacggcactctcatatatgagggtcggatcaacggtgacgatcagatcaagcttcgtggcattcgcattgagctgggggagatcgaaaatgctattatcgaggtcgcgaacggcaaagtctctcaggcggttgttgctgtccatggcgaagaggctgacaaatttttggtggcttatgttgtcctttcatcgcatggtgaaaagtccggtgacaatcttttcacagccatcaaagcagcactcccccttcccagctatatgcgaccttcgctattcattcccattcacagtgtcccgatgaacgtgcatggaaagactgatcgcaaggctctttacaatattcctttgccggatatcgtgacttcgggtccctctgagcgaggtctgatgaatttccaagaaaagaaactctgtggattatgggaagagatcttgccagcatatggtgccgtaatcagctcagggacagacttcttccatgttggaggaaactcgctgttgcttgtcaaacttcaacgccgcctcaaggaagcctttgcgttttctccacgactcgctgatctcatgaactctagtacattgagcgatatggcccgccttctagaggacacggatgcgagtgtggtcgattgggaggctgaaacatctgtgccggcatcatgggctgatctcgcacagagtgccacgccgtctgccccaaatgacagaatgacggtccttttgacgggcgcaactggttatatcggccgtcatctcctctactctcttcttgaaagcacccgtgtgtccagaatcatctgccttgtccgtgacaaaagcaagctagtcacagaatctgagaaagtcgtggcaatctcctgcgctttcgacaagcccaatcttgggctcacctccgatgagcttagctatctgactcacaatgccgacatcgtggtgcattgtgctgccaatcgatccttctgggatgactaccaggcactgagagccgtgaacttctattccgtccgtgacatcgcccgtctgtgtcttccgcgccgcttgccgcttcacttcttttcttccggcgctgtcgccgaccaagcggatctcgcggattcacacgatggctatttgacaagcaaatgggcagccgaaaagttccttcacaatgtatctcaggagtttggtttgccggtgcatatccacagtccaagcgcagcaactgcagacacgccgtacacagtcgactccatcgtccaacaagactttatcgaatgtgcacagcgtgtcggtgcacggcccgatctcgagggtacgtccggccatatggatctcagtcagacgaccggcttcatcgcgacagcatcggaggccattcttaacgggcgtgaagacatcgataacaatgctcccatactcaggagggtggtatataaccccacccaacggttcgatatccagcgctccacttcttctatcggtgctgatcccagatgggcgtcactgccgacgatggatatgctgcagtggatggggaaggcaaagcagaatgggttcccgtatgtgctgacggcccagcatattgtgatcggttcgaagacgggacaggtggtatctaggcgataggtcttgcagacatgacgctgaaattgtgtatacattagatgcatttattttcttcttctatgattctttttcccacacaatccagtacatacgaccatagggtgtggaaaacagggcttcccgtccgctcagccgtacttaagcnnnnnnnnnnnnnnnnnnnnnnnnnnnnnnnnnnnnnnnnnnnnnnnnnnnnnnnnnnnnnnnnnnnnnnnnnnnnnnnnnnnnnnnnnnnnnnnnnnnnnnnnnnnnnnnnnnnnnnnnnnnnnnnnnnnnnnnnnnnnnnnnnnnnnnnnnnnnnnnnnnnnnnnnnnnnnnnnnnnnnnnnnnnnnnnnnnnnnnnnnnnnnnnnnnnnnnnnnnnnnnnnnnnnnnnnnnnnnnnnnnnnnnnnnnnnnnnnnnnnnnnnnnnnnnnnnnnnnnnnnnnnnnnnnnnnnnnnnnnnnnnnnnnnnnnnnnnnnnnnnnnnnnnnnnnnnnnnnnnnnnnnncgccggtgagttagtagttgggtgggtgaccaccagcgaatcctcactgttgtatgtttttgtttttattatttgttgagtacggagtatagcaatagcatgttcatcttaggccctgtggtggacctctatgaatgactttttttggaaatgaagcttaacgagacctgagagcagaaggtaggtgggctcaagggtggaggaaaagtagaaactgacatgagagcacttgatatatctatctgacgctatgaccatcaaggggggcagaggtcacctgacccaatagtgataagccttcttaccatcccatctacggctatagtctatagttctcagttattatatattcccctccagtgctataccaaatacatacgaccatagggtgtggaaaatagggcttcccgtccgctcagccgtactcaagccacacgccggtgagttagtagttgggtgggtgaccaccagcgaatcctcactgttgtatgtttttttatttattggcaaaggttacatacatacaaatagaaaggtgcccaggtgatctgcacacaacaatcaaacaatccttttcccgtcgtctacctggaaaactcgagaactggggagaaaagacatccgaaaagacatccaaaaagacttactactagacagtaccaagatgacagacaaggccgcataagcggcctatcattcttgtttggtactgggtcaagattatattcagttcgtgaggcgtctctctatcgcttattttcttttatcctcactgccaaaaaaaacacaagaagaagccaactcaaaaccatccctgcatatggagcgtacatcttcagctattaggcgtaaaagacacagatagattgtctgtatagatggttacgtatgttaaatctgtactaatatatcccgttttcatttagtttgtgaaagtcgatttctacgtttatagtacgcaagatagctgcttaagtattagtcttgagcaggcgagggtataatcggcacctccatgagaggtcaactataatatgcggaaatcttgagattgggtgctatgtttctgttgctgatggatgtttgtctttattagagtatagagaacgcagttgcctcccgtcatagagattatcaacacaaaccatatatcaagtcatcaattatcggcagactccaaaatgctcgccgccttgtctatctcatcaatgtcattgacaaactgcagggctattgggagacctgatttttgagcaatgtccctaagacgcttcatgacccattttcgggtgcggcctcttgtgactggggattttccaaccgtgtataagcaccacattagtagatgcccacccgaagcacttccgttggcagatggatcggaagacaaatcggcagaagtaggagactccgctggggacaacacagctcccaaggactgcggaactgtggccaaaatatcgtcacccagagttttgaggattcgacatgtcttttcaagggttgtcgctatttccttttggcgggccggtgggagacccgcagtgagggctttcgacaaaaggtggaattcaatctcgcagataatgacttgaaggatacgagaattgttccaaagtcttatagcccacgcggatctgtagaggtcatatcgagaattgtaaatgaggtctgggtctccactgtgatcttcaatcgttgcatacggttcttgcgtcctaaaattaccaagaacgtcttgaaagtcacgttgaaggatagcagattcttccaggaagtatgctaaagttgcaccatctttgattttggtcaccgtaacatccgacagaagattgacagtccgcgtggccagcacgcctagtagccaaaggcaactggagttgtcggcctgcttgcttgcctcttcttgcaactcaagcatatctcgtggaaatggctcaaggcgatgaacacaggcagcgcacatatctgcacgcacttgattgaacatgggaatagaggctggacttgagaattggctcttgccacgtgaaaccaccagcgccacggtcccttttatatattggaaccatgtttcaaaattgctcacatgctcgaacaagccaagagagatgactgacattaacgtactatccttgatagattcgacaggagaactgagcgctgcgttcactttgtctatcgcttcccagtattttgtgcgggcccgctgggacaattcaggctgttgagtggagtttgccagggctgcaagacccacagctgccatgctggcaatcaaggtcggattctcaccatcagcgctaaacactgccggcacatagtccagataccctcgagagggagaaagaccaccaacgacgaaatgaaatagaaaatagttgacgcccacctcgtccgagctgagactcagagtgcgggatgggggcgatcttttcaatgtttccaagccatctgcctttgcccgagcgtctttggagcgcttaattgtgtgggtggtttgatcgcggaagaccagctcccattcatctctatacccttgacattcctcgtgcgcacgaatgcactgtccacaatggggaaacttctggtcgcactttacaaaaatactcagtactcagcattgagcgagtcctatccgacagtagattgatcccaggcacttacccttcgcttgatagatcggcagttgccgcaatttttggaacgtcgtccactcgctggcataattatgattcagaagagaagggagtacgcataagatgaaaaatgagcacttggcaagttctcttggcggttggaaagaagaaacaagctatgacattgttgactctttttaaggtacaaactacgcggctaccccgctgggctgagagctgaaggctcagactcagccgtgcgctaccccttttgcgccaagatctgcaaatcatacagctaagctaacacatgagaagtgtccaattcccccccctatttctccgaggtcgagaatttgtcgtttattcatgcggaaagagatgatgaatgtagcatttaataaccagcgaaactgcgtggtgttcaactcttgaaaacaagagaatagaagagatggagagtccaaatacacggtcagatacagtactaaaccgtttgatacagggtaatttaccccgaatctgatcagcggggaaatatcggggaatggaccgcagaattacttctcttagccactttatgtgaactatgttaccgaaatattagtgatacttcgacgattgacttagtttcgcttcttacaacacaatggccttttcagtcttaacaaattcagtatcattatggaagcgaacttcctcctatacacaacgtgacggctttctttttctcttcgttcttcaatttcatcctcaaagccactcttcacgcccaaaagacccatccttcaaacagaaaaacgaaactcacacgcccattggtttcggctcgatatcttgctgggggactggagtaagcttcacgaagtcgctttccagaatggctgatattcccaaggccatggtcattcccatggcaatgatttcctccaatacatccatgcacagatagaccgtggtatttccatccagtgcaaaggcactaagcgttgtgtaatcgctgagcgccgagtagacgaggcgaaccgccaacaagggagtagaaagagcaatggccaggaacaacttcttttggaatctccgcatagagaagctcagctcatagaaaagccaaagactgaggagaacaaagatgacgaatacagccaggaaaattcccatggctacttttgcgagcttgccagggtggtaagttccgtcgttgccgttggaggagctgactccagcgataccgagaatgagagcgatgatggtgaccagagtcagcaatgccatgggcctcggaggcattcttctatccacatcactataaagacacacgttagtctctgatcggcgcgatgaatactttcgcagtgaaaaactcacatttgtctcagcagtccgataaaagttagtaagagaggtgcaataccaatcatttggcacactgccaccgcgactttgatgttgtaggaatcattgctgattgccagcagcgaggatatacttccagcgatccggatgagagaaagggtgacggcgtaccgccaaatcttgctcccttgcctccaacctgtcctcttccagatgaagatggcagcaacgagaatgatgggaaacacgatcagctggaggatagcgatgccgtttcgatagctaacagcagccatgttgctttaaattaatggtaggacaaagaaaaggacgtcgtcgaggtaatttgaagtgtggtcaggaatgcaaacccgtttcttgagtggtttttgtaacacagatatctggtatcctttatacttcgaattgtccttcaatttgatgttgattcagcccggcgatcttactgccagcgtcaccgatcgtgattaaacgttccttattgactggtctaacatctatattacccgaataggaagattcttgctgatctcagcgtgtcagtggcttgggtcctaagcctcgccaagattggggccgaaatgatctgattatatcttagctatatctcctccagggccgatccctctcgagccaaagcgtaatatactacagtagcggtgattttttttacactgccccgcagcatcgaagatgcccaattcgggggagcgcccgaaagcttgttctgcttgtgcgcccggtatatcttataacacagtcaatcatattgcgggccgctgtgacaataagagaaagggccatttttgttgtcgattgacaatgtattgattatcaatatttcatccagcagtgacgtgtaaggcgctattgatgcagcctttgactgcagcatggaagaagcgggctgaatgaaatgcaaacgaaatttgcaaagatacagcagcctccatcggaaatgccgtgagaggctgagagaaaattatttgttattgctccgtgcggggtaccgatgaattgatcaccatgatctacacgtttacttgtccgagtatcgtgaggttgaacaaagaacttgggattcccgatccatagcgctagtccactttggggaatcgagatgcagcaccaatcacagcgctctcgaccccgttcgtgttgcaaagccaattgaccaaagaaagagtactagtctaatcaggcctacaacgggtgatagataggaatgaatggaacgttaattttctaaccgagtaacagtctaaagtgaatatacggtcagatacaatcctaaaccatcggatacaggtcgtccgcggttggttttgctctcacgggccctataccctagtagcaactctagggcacctacactatagttggcgcactatggtttctcggtccctgattggtttgactcgagatattgacagatatcaagctcgtggtggctctgcgccccaaggggccacacgtggtagatccatcgatcagatcagccaagtcacaccgtgatgtaagagcattggcccggatccatcgaattctctttctacttcttcatcaccaccacagcccatcggtgcagttgtcgagatggaccttttcatctaaaaccttgggctagtctacgacttgatttcgacacaaggtagaacatttctatgcagagcattttaaagcgtgtcctggtcaccttgacatttcatccttctacgcctaagtcctttagcccaactccaataaaggatctcagttaagtcctctttcctcttgcacagctttatcttgtctcaatcatcgtatatattattcttctcatatgaagctccactaccagaatcccctgaataagttactaattctacacgagctcggattttctccactgtccctgcgggaagccaatagaccctctacgggctctcaagaagcttcagcttactgcggctaaaactggatgagagactggtaatcaaaacaagctcaatatattaaccgtgagatgccagatctgagctactcgtagcagtagtaggcactacgcacgtttcaatgtcagccttcgattcgccgataaaatgcaaaaagaaacttactccgagggacccttccagccaacacatttccagcagtcaaagaagtgggtaggatcgtacttcttctttatccgaagcaactcgggataattcgatccgaaaaaggtctcttgccatttcggctccaagtaatggccttcattcaaatagcaccctccaccaggcgtcaaacgtttcagtggctcgacagtatccaaccatgcctcgagcagatttgtctcgttttggacaccaagttcactcgtccatccacctgtcatgagagtatgccagagagctgggcgccaggcaggattggcacttgtcgtgttgccattttggtgatttacaggcgtggtcatgatgatttgggtgagggaatcacctgcggggagcagcttattgctgagccgaactccttgaaggacggcatcgactaggtctgcgactttgcgtttgctctcaaataatgagcgcgggatcagtcgacctgcaacagcttcaaagattccgcccggtgtgtattcggcagcgatcccatcggtaatctgtaagaattcggtatatttgggatatgtcgtgtaattgctcttggtgacctggatatttgtttgattcgccaaaaaggaggaaaatcccctggtcagagttttcaaagccgtttcgttgttcgaaggcaggacaagataaatttcagctttggttggccagtagtaagcatgtcctgagatgttgttatgagaccaggtaggttggtaggttgcgtgttgcgtgagaacctgtttcaatgcagcgtaattggcagtttcattcccgtgtgtcgtgaagctgccctcgaattgatacacgttgattttgaccgctggatggagttgaaagcgatagcttgtcaaaatgccgaaggagcctccgcctccgcctcgcatggcccagaagagctcgggatcattgcatttattgattactcgcaatttgccgtctgcagttacgacctcgaattcaaccgcattatccaccatcagaccatacttgggaccaaagacgccgtggccacctccttgaccaaagccgccagccaggccaaccgacccttcattgccaccggtaacatccatgttgaactttgtgaaataggtgtagacgtccgtcgcctgagcaccggatcctatctctgcgatatgttgaccgttcgaggcaggacaattggatgcagtaaagtttttgtgatacttcatattgttcatattgtgagtccagattgcaagagtgtcaggactagtagagcgtccaaagtagtcatgtcctgtgttcttgatcgtgatccgaagatgatgttttcgggcgaatttcacagcggtaacaacatggcttggtttcctagcatcgacatacaatgatgatagtcggccaaggtagcaattgtcggaaatgacctcagccggattcaaagcattcagggcacatgtttgggaccggcatccttcccagttgagtcctgttgctgcgccgtatacgtcggttcgtgcttggtttgttgaatagttcgatttgacgatatcacaggctgaagggtcatagtattgagaactataatagcagcttgcggcaaaggggaccgtgcggtgcaggtttccggacagactgctgttgaaactctcccattctttgttcgatggccaacaaggctgtccggccttacaattgtaccctggggacgttgctgatgtggtggagataaggccaaagaccgccaatacagatgcggcgttcaccaaaggggcaaacaataattgtaccatgattgaaaaccggtcgtaggaaaggaaggaattgggaaggaatagttgtgatttcatgagatgctagcacaggtgtcgcattcaagtattatttatagttaccggatagcccatgagatcgtcacagcccccaatgttgatattttcccggccagcacacgagtaagctagtgatacttaatttaccaaaattgtttagatccctcaattctagtcgtatccactatgtagcagcacattgtccagtggggtccacgcgtttgtttctagagtaggtctgaatgagagcgtcggattggttgacaagagacccatagagctaaacttattttagaaagcgaaatgcagaaccaatcaacacctgaaaagataaatggtgatcatccaaacttttgttgacggcgtccagcggtctgtgttcttagagagttcaaatttagtaataattacgtagcattactagtctagctgtgtagataatccaataggaatatttttgggatttccccccaagtaggggtaagctgaacggttatgcccgaaaggatgcatttgctctggctgctgcaacgtcgctgccgtcatcgtttttgttagaacgtatagcagtgcatcctatataccctgataggagtagcttgaaagctagagtacgttaagggggctatatcatgatctcccgaaaagaagcaatatagtctcggacaatatgcgcagcatgggctggagcgttctcttgttagaaaattgatggatcgtcgagtaatgttggtggaaagacggccgtttctggcgccaaaagttgtcattttcggcgtcattttcacaggttctcatattctaggtgtacagtggttttgtcgggcttggtctatcactcgatatatattccacttcttttatttaattctccaaaaacgctctactgcatttcgctattgattttatggctgcacaacagtccatacctgtggaattcagccatccacttttccagtggcgcagagctctacctaaaatgttatattgctgttttagattctaacgtttgacaccaagcatgtgtgcctactagtcatattcattatctcagcagatctgaaggtggagaataatctggtttggattgaggatccttcggtcctgcaagattttgcgcgtgcatctctcggaaacccactgcgcgacgatattgaagggcatcatcccctagaaataatagaatactatatgagcgaagcaaatgtaaagtaatctcaaataacgactcacatggtccgcggtcaaaatcaatcgataccattccatgatcagcttgatctcgacctgtcgatggcccaatggcaaaatgaggctgtttggcatgagtgctatcgctctgtatttattggacatggtggtcacctgaccatcagcccggcaggcaccaacccccataactagatagtcgggcattctgcccttcaggaattgacaactctctccctctttcatcgcatcactacactgcagtcacatcagtattaaaacacattctttttgatggtcggtgtcacatgagtaggaaaggctcccgtatttggtggaggaagtagataaccaagatgtttggtatcctgcgattgctttcacaatttcaaatctatcttcgatgcccatcttgtcccaggcatgacctagctggatacgcccaaccttttccatgatgatgtattcggcaccaacagcgttctcgcctgctttcgaactccaggctagaacacatggagcaggagtacccaaaatattgcgaaccttacgaagattagtgatcatcaaagagcaggtagccacacagtcaaggacgccttacaaattccattgtggcgacctcacttgctgtcgtaaaatgaggctgtccagcattggggtttggcacctttccgaccacttcagcgccatttgccatggtgaataggaatgttttgttaaacatgccatcggggaatttttcgatatgagcatattcccttgagccaacagaatcagcggcaagcctcgcaagctcattcatatcaaacttcacccgacgtattgacagttcatgatcttcatttgacacatttagtccccttgtgtattcgaagaaatcgttaaccgagttccaattcttggaaagacatgacctcttcaaggacctggctgattgtgtaaagagcctgtgcataacggtgaaaacgaatggctatgctgcggttgcgaagatagtacaatacatggaaggtttaagcaagttcacgcgctaggtgtggcctacgccttaaacccgttcaaaacataatgtcgaattttgtacagcgtaatttaccactaggccataacaaaaaaattaaggttcctgtttagggcctagaggggccatatcccattcttgacacataagcaacgcgcgtccagcctcttcgcgtggcaataccttatcaatccattccaaccttgcaaggttcgattgagctgcttactaatgatagaggtgagcgccgggtgagaacgagggtcgctcagacgccttggagagaggggtacgatactcctagtggccttgtctttgccatgttagtttgggtactttatattaccagaggttgaaagtacatacatcaagcggttccatagctcagttggttagagcgctgtgctaataacgcagatgtcgagggttcgaccccctctgggaccattcttttttgttttttgtttttcgataaatcttatcagaatgtgatagttatggctcatttaagccttaaacaggaacattggtttttgttatagtctagtggaaaatatgctgcacgattttccgtcaaatcctcttctatcagtatccatcattgctttttgcttttacaaagctgtaataggctttaaggtagcagtattaggactacgtagccggactgaaatctacccagtgggcctgactctgagcgccctcataaaagcggcagcatctcacccgacagaggaaatatgtacgtacaacatggagtcacctaggtggtttataaagtcttcttatcgggcttagtctgtcactcaatgccttcaccatattgtgtcagtgcgagggcacgccatgttccacctaattttatcttattttctgactctgtgtatgttgtagttagaagaaagctgattatatatagtaatagtccgtggtagagaaataccctccgtgtcaatagactatctgacacatttctaatattgcgacatgatggcgtgttatcagtaacgtgctactagatagatatcactaagccacctatttccccgcagctataatatctaacagtaatccccattttcccgctcatcctcagcaacaaaatgggtagcataacagcaactacgttccaagatccttttcaaaaagtcccaacgggccgaactggtaaataatacgattgacacatccatcatcatccatgaacccgaattaagaacgcacatctagatggcctcgcagctctcgttgggaagttccgagaggataccgatcccaacagaactgatctccttgtgggagtgtataaaacggaggagggaaagccgtacgtgttgccgagtgtgaaagaggtatatataacgtctgaaagttcacctttccaccctcagcagatcactaaatttttgatattcgttacaggcaaagaacagaatcttcaatgatcctgattggcatcatgagtatcgcctttccgctctaggttcccagctttatagggacttgagcgccaatttgctttttgggcctgaccatcgtcttttgcgggagaaaaggtaaacggagaccgatatgctttctcaaaaacgatcgagggctgactttcccgctcaggatagtttcaacccagactctcggcgcaagtggcggatgccatgtcggcgcagtgctgttgaaaaatcattatggaccgtggaaggagaatggaaaccccgagattttccttccgagcgactcctggtgtaagttgtcgctagtgacattatacgaaggcaattctgaccgggtcatagtgaatcatcctttcgtattcacgtctgcgggaattaaggctagtcttctgccttattttagcagcaagacaaacaatttcgattttgagaggttttcagaggccatcagatcgttgccagctcaatccgtcgtgcttctccagtccggtgcccagaatccaactggatgtgatccatcaccggatcagtggcgagagttggcctcgatcttctcccagcgcggtcatttggcattcttcgatgctgcatatcccggatttgcctcgggagacattgatacggatcttgccggtgttcgtttgtttgccgagcaagaaatcccgcttgttttcgtctcaacatacggcaaatccttcgggctttacagcgagcgcgttggaattctctcgattcttgttccaagcgaagaagtggggaagaacatagaaacgcaattgagactactcgcacgagcggagtccggcgcaccgcccgatttcgggtccaagattgttgaaacaattctctcggatgagactttggagcgccaatggcggcaggaagtgcgcgatatggcgaacgaactcaagcgccgtcgagttgcgctaagggaaggattggagaaattggaaacaccaggtagctggcggcatctcactgatcagaacggaatgttttcgtaggtgttaccaatatcggacctagggagactcaagatactgaccttctttagatatgttggactgtccgtggaacaagtcactattctccgagagaagcaccatgtttatcttcaggactctgggagaatatctatcgcgtatgtttgatcggcatattttgtgaataggcggtgagctgacatttctttttcttagtgggctcaacgacttcaatatcgattacactgctcgcagcatcagtgctgtcgtcaaagctacgacttaaattaacttgaaacgggttgtctcatcgattgcacaattcagacagggaggattcgactcgagggcatgatattcgcgtctgagttacatatgaattaggacaaacatgaagtaagagaaaggaggaatcaacaaccatatctatccataaaagctctgaacgaggggacctgcagaagttgtattgccgtcagaagtttctctgggcagtaaataaatactttggacatgatcgcattcacatgttgtcgctcaattgagtcaatatctggacgaaagcgtgtaatgattgaatcgagggcatactcttgattaggcattggatcttgatcataccaggaatcacgacctgggcactataccaaagtcaccgagaaagaattcctcagtccgtaggctttcgggggccttcacagctcaaacaagccccccccccctgcttccaaagctcgataaatggtatgatttgctttagtggccataatttagcgtgtcatatatgaatataaggttctgctttcttgttttgacgttaattctaaagtggccataagaatcaacccaagatggtcgtcccatggtactcgaggttatcgtcaatatagaagtggatatacgaacctagtgtggtcaagaccgactgtaggtggtgcagtcatatcaatttgacatataatgtaagagacttcaaactatgagggagggtatcgtcacaaatatttaatatcgctacattttctatgaaaacaccaatttcgagcttttccaatctgtttatctaccaagtccagcattgtgcactctaaggcaggctgtattgcaatgcggatccagttgctgtgatatgaatattcggtcttgatttgcaacagaggagtgccaattctatgcagtgatgattcaatagagcttatgtacgttagacgccgaggaatagtgcggtaggagtagatatttccatgtcttcagcttcaatgacaagagagtcactacatatgcactttgatactctctgttttgtagtaatattatgttatctgacaagtgatgagggtctaatagctccttctgtatcatgacctttgtttgcccgaattttgttgcagctgtcacaaacagcccagaacttccaccagtcctaatttcgcccccaggcaattttatcaatcaaacttcccttcttgttttatcaatactgtgttttcacccattcactcccaaccctccttttgtcaacatcatcacaaagatggcttccgttagctttgccgagccgtcttttgtcgaacttgttccagcacttgttggagagtctaatttctctacgtggactacttcactcaagtggaccctcgactcgcgcgacactcgttattacgcgcttctcaccggcgcgtggagtgaacccagcgcagttgaccccacacagcctaccccggctgaagtcgaggatcgtacccagtgggatacagccagtcgttacctccttccgctactgaatgccactgtccaccacacggccaagttctatattctcgatgccaataacgcgcgtaccgcatatgccaacctccaccgcgcgttcgcagcccggtcttacgaagctggtttcgccaatttcctcaagtttatcaacaccacatacacttcaaacagacctcaagctttcgtcaatgagtggcgtctcgccctcggcgagctccaagagtgcaattcgacaaagctcacgcctctcctcatcttttaccatttcttgaacgctgtgagcaccaacccagctgcgcatgagtggctcgacggcttcctcagttcgaaagtctccaccgatacaaccatcgagtcaaccttcacagactttgtcgtttttgaggaacgtcgcctccacgctctcaatcaagctcattcatttagcttgaacaaagggaatcacctgccatacttttgccagtttcatcaacgtcaagccggtcattccagtgcgaactgcttccgcaacccggcttacttagctctggacaaatcagctccagctcccactcccgctcccgctcccgctccccgtgcagtcactgaagacccacctgtggagtagagcagcatctcaccaactaggggctgtgtttgtgggtggtttgccacaattgttcatggggaggtgttcggattggatggttccgtgaaatttgagtcttagcaacaatcaactcttcgcatgttaccatgcacattgatatcgtccttcctgtaggcgtctctcgacatgcaaataagaaatagtttagtatgacaaggctttggccaatgtcggagcaaaataaaaagactaaataaaaataaaaatatctggactcgcggggaatcgaaccccggaccactcccatgctaagggagtattataccactaaaccacaagcccagttgattggtggattgaatccaatagtgaaatgagagctttaacctttaagcacacattacacagcacctcacatatcgttcagttttcacctggttccattgaagtgcagccaccatcctatttgttattcacctacccatccatcaacatggagaatactttggatggaaatagaaagagatgtgacattgatggctttgttcaagtgcctcaatctgttttgttccaaccacacccttgtatacagactttaactgcagtgtatctgttggactgaaagatttctagtagctgattttccaggacatcaacacccatctcatcgtttgcccagtggaatgccatgaccatacctctggtagatggtctgtgcctgatggcgtcattgatagatctattcaggctcgcagcgagctcgaggctgatggccggcgggatttctcatagatggaacattgtggattccttgccattatcattttgtatgactgactgtaaagaaatacgtgtaatctatgtctgtcccgatttactgatctttgtcatgttggtccttgcgcaggtgctttgaagtttagtgaattcgtcaaatctgataccatattatattatttacactcaatttgcaactatcctctaattggatgcggcgagcgcctgcctattcgcgagacttcctgatgccctaaacaaagccggattcctgaggaagttctcgtgcgctctgaactcccccttcggtttcttcggttccctcatcatggggtctctgccataaccaccaccaccaggggtgttgacaatgatgcgatctcccgcacgcatatcagccgatgatttgccgctcatgccaatatggcgcacctccccagtgataggatcatgtctgacccatatattaacaccgcgcatgccttcacacccaccagcaaggccatagggtgcattgacacgtctttctgagagaatcgagacctggacggggatgcggaactcaatgtcgcgaacgcagccatcacctccacgatgcaacccggctccaccactgcccttccgaatggagaattctcgaaggatcactggatactgtctctcgaaaatctcggggtcaccaatgcgggtatttgtgacacctgtgtgcacaccactctcgccttcccagtcggcgccggctcccgctcctccggcaatcgtctcatagtatccgaatcccttgagaatctcgccggtcacggcatctttgcctccgtacccgaaggtcaggttgttacatgttccctgcgatgcagcggctgtgtggaacgccttgaagatgaggtcgatgacgcggtttgtcgtctcgcctgtcgacccgactgttgctgctgtgaaggatggtgtcaggagtgtgcccttcgggcagacaatattgatgggttgcagacagccctggttgagtggtatgtcggaggagatcatgcaacggaggcagtactgggtcagtgttagtagtgtccgcaagctgtcatgaaaatttgacacgggggaggaagaaagaaagagggagaaggtgtgtgaagacttacaagaatggcagagtacatgcaggctggcgggcagttgagattaccgtggtgctcaggtccggtgcctgtaaaatcgaaaatggcctctccggtctccgaattgatggaaatacgcagtaccaatggcgtaccgtcgtcggtgtagtcgatggcctcaaggtcggcaccctcaaaccgttccgagaagaccttgagcagctcccgcaccgactgagaagcgttttcttgaatcgcattcatataaaactcgacgacaggccaagtatactcattaacaagtgagcgaatgagttgaatgcccctctgattggacgccacagcggccttcaggtcggcgatattgtctttgagggtacgtgtgccgctgcagccgggatacttagcgggctcgttgtacaatatgtcgatcagcccttcctcatcaaaaacaccctctttgatcatcttgaacgactcgaacgacgctccctcctgccataactccgtcgagttgggcggcattgacccggggatgataccgccgatgtcagcatgatggccacgattgcccacatagaagagaatctttgtcgggttttcgtcgttgtcaaacacgggcgtgatgcaagtgatatccggcagatgagttccacccgctatcggatggttactcaggatcacatcaccaggcttgagctcgcctggcttgtaccgcttggcttggtatgcgattgccgaggccatggatccgagatgacccgggatatgaggtgcgttggcgacaagacctccactggcactgaagacggcacaagagtagtcaagtcgctccttgatatttaccgagatggatgtcttttgcattgcgttgcccatttgctcggccacactcatcagccgatggctaaagacgctgagaagaattggatcgatggcctccgtactagcaggcttacgctcgctatcagtgatctcgagaatgatgtgctcggggagcttgatagccttgctgttgctgtcgaccacaattgtctgagtcttgtcgatgatcatggctgggccatggacccgagcaccggtcggcagctgggtaaggtcatacacgggagtatcgacccacccctcgttctcgaaatagacctttgaaatggactgctcgctaaactcaggggaagacaacgactcgagcttcaggagctcagcgaaagggtttgaggtgtggacgtctttagccttgccaacactgcgaacacggacgtcatcgaccaggatatcgcgctgctgggagaagccaaattcctgctcgtgtcgacgggtaaatgctgctccaaattctgcaagatcatctggttgtcggatcatcaacatcgtgtcacttccccggtaccgcatgtttagatacatctcatgctcaatggactccaggccgaaaccttgggcagctaggccttgctcgccttgtgaccgaagcttcttgaagcgagactctacccttggcataatatcagggtggtaaatcagggactcgggctcttggttttcgacagtcacgtcggcaagagtcataccgtatgcagagaggatgctggagtaccgcggaatgatggcgcgacgaataccgagatctcgggccacgaagactgcgtgttggccaccagcaccaccgaagcaagccaggttgtggttggcagtctcatagccacgtccttcacttagagtccggattggtcgtgtcatagttgcattcgcgatggacaaaaagccacaagccacctcctccggtgttaggagagagtcgccatctttttcctcgttgatggtggccgttacatccaggaacatagtagtgactatgtccgtgttgagaggcttggggaatgattccttgataatccgaccgaggaagaggttggcatctgtcacagtcaaaggtcctccctttccatagcaggctggcccagggttggcaccagcgctctccgggccgaccttgaagagaccattctcccaggacaaaatggaaccaccacctgcagcgacagtattgatatcgagctggggtgtctggatagaaatctccgcgagtgtgctctcgaacacatgttcaagctcgcctgagtatcgggccacgtccgtactagtgccacccactaatttatattgttagttccataaatcatcctcatgatatgacagagaagagagcttactgtcaaatccgagcaatggtgttgcgtcactggggtcatagcaagtccttgagacgccgacgacaccgccagcgggtccactgaggacaccgcgcaggccagcaaaatttttgaagttagtcagaccgccgtctgactgattgaggaatagtttgtttccgtttttgtcttcgagtaggcccttgaagccttttcggaaactctcgagataacgtgttgtgacaggcgtaaggtaagcatcagcgacagctgactgactccgcgggatcagctttgccatggatgaaagtttggaggacacagcaacgttgaagcccattcctttggcgagatctgcgacggcaagttcatgatcggggaacatgtatgaatgcatgagggcaaccgcaacatcacggaatccctggtcccagagacgcttcagatcgagacggactgcatcgaggtttgggcttttgagaatcctcacggcctcccctgtgataccttcccgcaggtcaacatcggcactaatgtcgatgatagttggttctggattttcgccccatccttcgatggtcacacgctcatctacctcgataacggtttcgtataacttgtccaaacgtttcacggtgagatcgaataggtctgggcgggcctgatttccaattttgagagcttcccggaagcccttggtggtgatgaaggcgactctctcgcccttcctctccagaagtgcatttgtggcaactgtggtgcccatgcgaattgattcgacgcattccaggtctagcagagtcccgcgggggatgctggctcctgttgcgatttccagaacctgtcgtatacattccgttggtgcgtcgctgtactcgtcgggagactcagatagtactttgagaatgacattttcctcgcggccaggtatttgagcccaggcgtctgtgaaagtgccgcctctgtcaatggcgatcagaactcccttggatgccattttgttgctgctcttgttctccttcttttctgattcaaataactagatccgtgatgatttacagacttgcatggaaatattcgccgtttaatagtcacggcatgcagatgtccaggccgatatagaccggcttagggttagatttgccgaatgtcgggaagtgcagctagcggccgcgggacttgggagataagcgtatgggcgggggactcagccgggggactcaatcagctattttagtcggctgaggagcagccaaaccttgttaaatcggtaatacgctgcaatgccgatccgctttcccccatgataggtactggtggcgtccactaaccccaggatgcagataagccatacccacaaattgtatgacacttaggtaaatataggataaatggactgaggtagccaggcattccccatctcactgggaagtgtgttgaactttcacttccgaattctatattcacttaagacctagctcacttcaaagtcgagcaatatcatgacggagcccgagacagagttggacatgctcaagtctgccaagatgaccaaggaggcctcgaattgcgatgaccatgagcttggtatcacaattgagacctatgatcgcaaggccgaaagcaaaatgttgcgcaagtttgacgtgagtttggctgagtaccttgttcaagacgccatgagtagaatggagagagggcatgatactgataatcttccattcagttctttgccgtcatcccactcggctttttctacatgatggctatactggatcggagcaacctaggcaatgcacaaatcgctggcatgcccgaggctatcggcctcgttgggaaccaatttggcaccgctaccacactactgtactaccccatattgctagcatcctactgcgacgtctctaacggagacgtagatatgctacttatgttcccttcgaagccccgatttcggtgttagtcaagagtgttggcccgaaagtccttatttcggcctccgccttttgttggggttcttccacactgggaatgggtatgaatgaaacacatccccgaagccagcaaaatcctttctgacacacggaacagcatttattacaaactacaaagggctctacgtctgccgtttactgatggggctgtttgaagcaggtctcatccccgcaagtgaggtctacatggccctggtttacaatcggaccgaaagagggcgacgcatgtccttattctacaccttcagctgccttgccagcgcttttggtggtctgctagcatatggactgacacagattgatggacccaacggcttcgaaggttggaggtggctgttctcagtggaagcagccatcaccatcattctagttcccatcttctacttcgtgttcccgaaaacccctgttgacgcctggttcctgaccgatgaggaaaaacgcatcgtccgggcacgctacgacaatgacccacattgggccttcgatgagaagttctcgtgggttgagcttggtaaagttttcgccgatgtgaagttttatgccttctttgtctaccagttctccatcaacctcacacagtttggcttcactacctttctccctactattatttctggcctcggttacacctctattcatgccaatctgatgaccgttcccatctatatatcggctcttgcgttcttccttgtcatcgccttcgcttcagaccgttacggtatgcggggaccgttcatggctggccctgcgggtttaattcttatcgggctcaccttgctggtttcagttgagaatctgaatgtgcgcttcttcgcttgtttctgtgagccatatcgatcttaattgtcccttgcgattaaggaaaagactaacactcgaacagtgaccgcattcggcctatatccagccgcagcgctgtcgatgatgtggctacaagacaacgtcgcaggcttttataagcggtccagcatggtcggcttcacgctgactctggccaatacggccggcgtggtagttgggcaaatttttacctccgataccaagccctactataagaaaggcctttcaatttgtctcgggttcagtgtcctggccattgtaattgccatagctctgatggtgggcatgaagatcgtgaacagaaggagagaggcagcaattcgtgcggcagaggcggccggttctccactcccccgtcaacccgagatgggagactgggacgtgtatttcaggtataatatctagagtatgtgtcgaaccacagagattcggaataagctggtatgccagggagctggactggatgggttgaaaagcgctgtctagcagcttttgataagtgtctcatattccatgtgctattgccatgtcaggcaacaggtgtcctttacaattgatgtcctgtctataataaatgatacgtaatatcatattgcactatggaggttagaatagtattggaagtcatactattgaccaagtcagcagtagaatatgtagaatacaacacacatagtattttggccctcaatacatacaccccttcaaaactcagattgatactgttattttacatattgtttacacattgtttacagaccgctcaggtgactgttcatgtgactctgggatttttctgccgattttcctatttttcggaggagctcccgataaccttcaatccgatgcgcaaatgagaatcctcaaattttgtggggaaaatagtagcgtcgccagatatctccaatcatgaagtgtctagctatatatggacggagacagaaacaatccccacagataagacccggcttgtgctagaacatcccgaggctttgagccttgctgccgatatccaccctctggatcctggatactcagataatttcggctcagcgtgctctaacaagtacttccgctttagcttgacctagccttctatggatcgtgcggagtcgtctggcggcgagtcgcaaagacgcgcgaaacggacaaagaggagctcggttgcgtgagcaaacacccatgacccactcttgtcatttgagatgttcaagctgaatcaattgccctcagatgccggagatgtcatgcccagaaggtcaagtgctctggaggtaccccatgcagtgcctgcttgaccgctggccaggcgagtgcttgtaactatccttttcgagagcgaaaagtcacaatatctgagaggtaggtaatttcctcccagcagctggtctgtacgcgattatatcttatctaagagtgccataaagctacctgaaacaattggaggccgcctcgaatgctctcagacatcaaaatgaatctgcccgcagccagccgaggagtcccattgacgtcgaccagctacttgactcgacgataacatcagcagtatcagacctcggtgtcgtaaacccgttgttcgatgcacgccgggagaagccacccactcagatcgtaacggaaccgtccttcgttggtgaagcggcatgcgatgcctttatcgagaggcttctgcagtcgctcagccagagagaagccaactcactcccgccaccgcacaagtacatgatagaccttcctggagcacgtatgcccgccattaactataccctacccgaccgagtccacgccaagctcctgatccaggtggccgcgaggttcatcggaaatggccagcatctctatttaaattcgtatatggaggaggtcgacagtgtctacaaaaaagatgccgaacctagctctatatggttgtgtaagttgttagcattggtcgctcttggtgagttgtactcgaataggcggcgcagtaacggtgacaatagggcgccaggggaggaatattttgtatctgctttgggtatgttacatgatcaatatgaagataccacaactctacatgtcgaggtttatcttttactggttagtcactggatattgtcgcgtctctatgaaatatacctaatttcggcaggcctgttactcgaatgcactcggtcgcgttagatctgcctacacatattcaggtattgggatgagaatcgcgctaagccttggcatgcatcgatcatcatcgtctctacataccagtgctgtcgagcgggagtcccggcgccgcatatggtggtctctttacctttttgatcggcttacttgctcgaagctcggccaaccaacggctgtgaatgacgatgacatcgacgtggagctcccgacgatggatgggttaacacctgaagagaaggaagaatttccagatccacgccacttattcgcgagcgttggccttgcgaagatagcaggagacatatgtaagcagttctcctctaactagccattcttcctattcacagggacataccaggctaacactcgaatacaaataagtgagcgatatatactgtatgccaggacgaaagaagatccacttcgtgaagagggtccacggtattctaagcaacctccgagactgggatgacacgctacctcaacacctcgctttccgctgggacgattcaaaccgccatgtcgccagtctccacctctgttacaaccagtgcataatccacacaacacgaccaattttactacacttattccgcgtgcagttctgtctggatgggtcccgcaccgcagaccagccatcgcagagcttctcgccgacgacgacggcgctggctgatagctgcgtaaatgcggcgcgtacatccaaccgcattctttccaagctatttgttgacggcacattggctactctgggctactgggacgcgcactaccttttctcttctactctgattcttctcatgtccgccgtcatgagccccagtcaggctgtctctgacgctgttgacactgctctcagtgtgctatgctccatgcgtgatgatggtaacgttcccgccaatgactactatgaacgccttcttcttgtgcagaaaagcattaccgagctgagggatggagtcaggaaagggagagatggtggacccccaaccgccgcgcagagtcctcaaatcgcaggcacagcccatgaaagggcacagttagacgaggttggctgggctgcacagaataatgacgttggaggtgttgggatcgaaaatttcaggctcgaggacaatcttgacgcgctggccaatccttatattgacggcttcttggccgagaagtctttcacctggccgtcgaatgcatttcctgatggaactaccttgcagcagtttgcgaacgagctcggcgttagctttggcctactcgaccctcattgtggctagagggataccggacatactaaactcttcttatttgattctactgtgtatgcttagcgcattttggaagacttctctggcttaagcaagggtataagctgcattgaattcattttcaaccctggtagtagatatcaccatgtgtagatgagacagaatggtatgaaatgactacacaatggctgctaccaggcaaggaagaccactagcagaaaatacagatacagctcagaatactaacgaccagtgagcaatgtaatagcgtttgcacaatccttcccagctcgggccaagatgccagagtcttgctgtaccagaatgaaaccggctccgagcttattcaaagcccagtcatgcagctcttcattctcgtagataccagcaagaccgaatgtcttgccatgtttcttgcaggcccgactcacggcctccacagccgactgaaatccatcgctcttgaactgtgcagggaccccaagttccgtagataaatcgttcgagccgatcagcagcacatctatcccatccacggaagcaatctcgtccacattatcgatgctctcccgggtctcaatcatcacaaaaacagacgatgcattggagttattctcctgggtgaaaacaccgaccggcgtcgactgaagccggaaatatggcagctggcctgtcatagacctcttccccgtaggtggatatttgcaaatggacactgcgcttagggcatcatctgtggaagcgaaaattagtaaaagaaagaaaatcagggtatgtttcttacctttgttatgaatatggggaaagatgactcccatggcaccgccatccaagacgcgctgcacgaagccgtcgccacactggtaggggacgcggacaaagggtgtgatacctgaacccaggcccgccatacacagcagacttgcatcattgagagatagcgtcgagtgttctaggtcgataaagagcgcatcgtatccactgttcgccgccaactggaccacttgggggttggtgactagccggataccgaatgcctattatcaccagttagcagacagataattatcacacagcggtcactggaaattagacttgccttgcagatttggcccttcgccgttttctgcagcaggttattggtgtagctggaacccataatgaacaaaataaaagtcgaagtagaagtaattcgatttgacaacttgtaaatgctttgagaggagtcgagatatcttgacacaggcaaatccaatccgctgactccttttgtactgaccaggatctatagatgtttatcgggaccggttagtgcaggccgtacccttctttttccgggtcggctcctgagctgccgtgccgtaacaagaacaagatcgggtaggctgccgactctgtgagaaattacaccaagttcaccttcaaaaatatcgggttagtatgccggagagatgttggggttatgtatttaggtgagaaattctgcgcaagaaacgcggagtagcaagagtctgatacgagtcttgccttccatttccctctccaaacttcattcgatcgaaaaaaaaagatgtttgacaatatacccccgggtcccgcagaccctttttttcatctgaagaaaaaggccgatgaagatgaccacccagacaaggttgacataggggtaggcatataccgaagcgagcaagggacctaccaggagttggctgtcgtaaaaagggtaatcatgccaaatcaagacaaagatgatgagacggttattaacgagaggtacccataggcaaagaaaatactggagcaactcgagttggggcatgatgtaatattccgcatatatcaaagatcccaaaccgcaccactaaccaataatttagtatggactcactactggggatgatcgattcctcaagctcgcagcggaagtcatgtttggccaagaaaatgaagcgttggtatcggggcgggttcgtctccacagaatatttggatcaccatatattaatttcccaaactagatcgcatccgtacaaactctctcgggtacaggagccaaccataccgctgctgtcctcatagctagactactggatccaaagccagccatctacctcggagtgcctacctggaacaacatgaagccgctctgtgagtatgccggcttagagaccatcgagtacccatacctagaccgtgagacatccgaactctccttccagccctgcatcgacgcaatcaggagtgctcctacagggagtgtatttgttctacagggctgttgccacaacccgactggcaaagacatcacattggatcagtggcagcggttcggagaggagataaaagcacggggtcacctagctttcatcgatatcgcctaccagggactcggtgatggattggatgaggacgcagcaggcgttcggatactatcacgtctcggtatcgacatgatcgtatgccaatcattctccaagaatttcgctctgtacggcgagcgctgcggagttcttcatgtagtcacacggtcagtcgaggctgcgaccaataccaaagaccagctgcggagcctaatacggcgcgaatactcctcatcgccagcgtacgggtcgcggttggttacgatcgtgctagaggatcccgagctgcgtcagcaatggtaagggacttgctagtgaatggtcgttatttctactcactgatgattgattttctataaagggttgatgaactcgcgtccatgagagcaaggttaattcagaacagacaacgactatacaaagaactgtctacgattttgcaagtaggttgtcttcccttgtgtccctatcaagattacaggcgctaacataatatactttacagacaccaggcgattggaaacatattgtggaggagaaggggctcttttcgtacatcttgtcctctcccccaaaacgagtcgccataactgaccgttgaccaggtgcctcgcgatcacccccgcacagtgcaatgccctcaatgacaactaccacgtgcatctcccggtgagcggccggatcaatgttgctgggctaaacaataataatattgagcggacagctcgtgcgatagatgcagtggtccaagggaatcgttagattgttgattggcgtctatgattgtagcataacatgtgctttgatctttctcgtatcaaagtttactagaaaaatactctatagccgacctccgaagcattattgctgataacttcaatttctcgagcataacgaagtaacaccgccttcagagcctattaacaggagggtacgatttatactctccatataaaaatagcacaaacctccccactctagaaatcaatataagttcctgaagtttaaaaatacgattctggtttacatatcgacctacctaccttttcatactaccaacttatcaaccctatcattcaggaaattcaatcaagatgctagcaacattgcatcgaaagtgacagaaactgcaaactgtggatgagccaagggacagctacccttctggggactgggatgggaaaagttgaaccgtgagaatgaggtaacaattgtcagctaggagggtaaatcacttgacagactaaccatgtcccccgtatcgctcttattgcaagatcgtttttctcgtggctgacaagaaggacagcaaatgttgtgaatacatttatacatccatatctccgatcttgatgcctgacaattcctgtaattcctgataattcaggcatcacggccttggcattttttcacactccacaccggccaatgtcaaatgaagggcgtcggcaagttcgggtccgatggcaccgaaagttttctaacatccccaatataaattgctggtcctagccaagtgtatatacttctcggatgttttagacggaaaggttttcactattcttacatattgtctcgaattgattgacaatggcgcattccgattcagaacacaaattgaagaaaccctggattgaaacgcctttgatcgagtcggcaacattctcaaaggctgccggatggtacgactgcgtttttattttccctaatcaaatttctgagctgactaaaaatgtcaatgtagtaaaattttcctcaaattggagtcgctccaaccttctggctcgttcaaatcacggtgagttcgacaatccaaaaaggaatttgatacagaatctaaactagttcaggggaattggaaacttgatcctcacatctctttctgatccatcaaacaatggcaaaaccctgcattttttcagctcctcggcaggcaatgcggggctcgcagcagttatagccgctcgagatctcggttgttcctgtactgttgttgtgcccgttagcgcgaagccaatgatgatccaaaaaatacgcgctgcaggagcttcggatgttatccgccatggcgccagttggttcgaggctgactcgtacctgcgaaagaatttcatcgaaaatgaggacagcaaatcagatcccttgaccaggaacatttatattccaccattcgatcaccctgacatctggcgcggtgcagggactctggttgatgagctagtcaagcagttacctccaaggcaccacggaaaaaccgatacctgttgtccgttcccagcagatgcaatcgtttgcagcgttggtggtggtggtcttttgaatgggattatcgacggccttgagaggcatttgccagtgcctcaaccggcaacacttccccagcaagcggcgaagaaacttcaaatcctcgccgttgaaacatccggcgcggattcgctggctcattcgctacacaagggttacttacaccctctacctgcaataacatcgcaggcaatcaccctaggggcactctgcgtggcacagcaaacactgaagaacgctcaatctcctccgcccggtatcaaagtcactagtattgtgggtaccgacgccgatgctgcgaggggagttgtgcgtttgtgtgatgagctgcggttggaggtcgagctggcttgcggaatcagtgtccaagttgggttagataggctaagggaagtcatgacagacctaacaccggatagtcgagttgtaattgttgtttgtggaggaaacgatgttagttccgaaatgattacgggttaccggcaaagttcgagagtggctggcaacgaaaaacgacgggaatcgatgttgtgaaaaatctgatgttggaactacatttggttgttgaaagatcgtgaattacctactcccctggtcagacccatctgtattgatgcttaagggtaatattatcctcttgctctcatctaacctcattccgtgtctaataatgataatcctcgttaatcccacactagcgagtctaccattgcattaagtcttcaatgcccaaatatcactgcagtcgaagagatccgtgatcctcggcttcatctagcgcatcggcaatacgcgacccctctccctcgaacagcatcccgtcgtaagtcgccgcgcctaaaacgcagccaacaataggggcgaagaggggaacaacgaaatagtagttggccgccgtaaacacctctcggccatagacgatagcagagaacaatctcgggccaaaatctctggctgggttaatggcctggttttattagtacgatttcctaacctgataacctgggaacatacataaccggtctgccagcccaatgctgctccgatcatgagcagcagcagaaagacagcgatctggggagcaggaaatcgacgggcatttccaggatcggatatgctgagaaggccgaacatcagcacagctgagcccagcatctcagaaaagacagcctcccagttcgactggaagaaggcacctgggtaggtcgagaagatgcccgctgaatggtgaccgaccgggctcaggattgatccgccgggaatggtgtattcaggatcccaagctttaatcgccgaacggtagttgatatatacgatggcagctccgacaaacccgcccaggaactgcgcagccagcttgcctgggatttgtttccattgcccttcagatggacgtacaagggcaaggcaaagagtcacggccgggttgatggtcgggccgggatcggataaatagccggatagacacacggcagcagcccaggcgaggttgatagacagccaggtgccgtagttgtagtcggagagcagacattgggcgacaactccatccccgataacgattagcagagcagtcccgagaaattcagccgcgtatggcttcagtgcccgacgagggatcatttcggtgaagatggtgttgtaatccgatgcccttcgtagatacaaggtgggatgagggacccctgattccaaccaaggttgatgtgcgtgtttacataatttaataaaccggggacggtgacgtcatattgctcggatcttcctccgatatgcccaatacgggatgccgattctcccgatatgggaacaagttgttgtcccaaggtgatcaaatggggtttctactgtactgcttttgcacccagtcttcgccgacacagaatactcgactacatatttatgcactaatatgtgattttctgcaagtgaaatctagtataaatggcacttgcattgtaacaacttgagagttctaatctctttcatactaccgactcacctaaatctatcggtctgaagaatgcaatcatcatactagcaagcctatatcaaaaacgatagaaaccgcaagtagtcacctataccaagatcaagggatgcctatcatacatcttcaatatcaaaccgcatgttcaggcgttgaaggtattcaccatcatggaaagtaacgatcctagcaattcgttttctgccttggccccacgcacacagaacaaaagctgcaaccgtcttaccaattgcagtacccagcagggcatcaaactcgcacgagggagtccagatccggtgttcactagaagggtactcaatcccctcggttctatacacttcatcacgaacacactgtaccgtgtcagtttcaaaaatagaagtaacgaatacatattcaagactgttaagcgaaaaatccatctcataggcagccttagttaattctgatatatgtggagcggtgcttcgccttgatcgacggatccagtcaaggaagaccaccccttgtccagtgcgtccctcccagcccaccggtggaccttgtcgattatggatttctatcttgttaagctcatctggtagatcaaaagggtagatgcaggtatcccatgctgaatcccaccatacagcttcgtgggtgacagaataattctggggttggggatcatatgtcacagcgaatgtggatctagggtaagggcacccgggctcatgttcacgttcaatccatcttcgtaggcttcgtcctttttcttcccatggaaagtatctaggcattatgggttaggggctaagagatagttaggagaaaaggcctcgaataatactcaccaactcgtcaattaaactggatttgcagacgctatctagtacctggctttatatctccgatatcacagactgaggacagagaaggtccataaataccattgtttgaataaactctaagtaaaggacgagtacaaaggataccactatttaaggggaaacaataagcctggaaataaaggaatctgctagagagtgaaacaggtgttagctaaataaagcactggtatcttttggagatagtaattgattctcattctgtttatttcagtgaaggttctatttgagtaagattgaatgggcgttttattgggcataccaagttacttcttgttctctttcgtcattttgttccatattgttttctgaccaatttggcataagatgattattggaaatagctagtccagaataacccaaaactcctacgcgaatttcccgatacctggcttggaactaaggtccgttcaatttgaagatactgccatgatcaccagctacttgattagaactcactcaatagtgtaccatttgctagcaaaagaatgctgaacccgggtcaggttgtttttgaaggtgctcacaagaactatatatcctccgagggcgttattatctagcctgatgtcttcttctgctcccatatgtcttcccaggggtttgatattaattgcacccctgatcaaattttaaaccactcaattgagcagcattgaatatatttccctatatcagaccataacatacctgaagttaataaaaccgtgatgtttatactcccacaccgtcgtggcagaatcaaacatgcgccaaacccctttaggccaagcgccccaatgatagccaagcatccaaacaatccacgtagattgcaaggagagtcctctaagcatcccacaagcataatcatatctgctatccagacccaataaaggtatgtgaatatatctaccctgtttgaaagagactatccgcaccaattcgtccctaaatgcgccccttctccccgcattgcttcggggtcgcgcgcataccccgtggtatttaggccatgatgtcagcccaatggagtgtctacacgcgtcaaagtttgagtcaatctgcttgtatactaacaaaattctctatatagcgccctcaaacattcaaacctacctgccgcgttcaattaattcacaatgtctgtcgaagcctcagcatcggtacgttaatcgcagatgacaccacagcccgcgacatatcaatccgcaactaggctgcaagaatacgcactgccattacattgtcacaaacggtcctaacaaccctccagcccatccctattgaggatctcactaagatcaccaccgaggtacggccgttccccagaataccccgtagaatcaaccccgcgctaacattttactctaggcctgttcggatgccctcaagacaagccagagctacgagcatgacaatgtcggaacctggaactcccagattatcgtaagcactaacacccaaccgcgcaatagcgatactaacaattccccgcgcagaacaccgtccttaaggccctgatctccgctaccgcacctaccgatgcctccaagcctcctccctaccgcttcaccgtgaacagcacaatcgtgcagcagggcgtgattgacccgtccatcgccgagggtggcgcactcagcaatgccggtaagcgtggtatgcattccgcctccggggccttttgggatgtcaaccgcgatggcatgtggactttcaagtacactggtgctgaggagcgcgggattgatgttgttgtttgtgtgacatggtttgccgtcgtataaggacgggcctgattttttttttggcctgttctatgatgagcatatccatggatggcataaaagtccataagcggaggtcgtgactttgtctgtgagaagttccttgaactccttatcggctttgtatcacgggcttcatctttctttttcatgtacttgaacatgtgtttttagtgctctgggtatgttcagatctgctcttctctttctcgtgtcatttgatttgagttcggtctaagcgtggtgttatgtttcttctagtttagacttgctggtattcttcgagaaattggatagccttgcaaatgtctatgggacatccatggatgttacccagtatgtatacatagtgcggagaaagaaaacttggcatagatattggaattgttagtggtatctcaagactatgcaggatcctctgtgggatgaaactatggtaagtaaaaatgtctgcagaacaattcaacgacaaaggtctccattgaccagccgaaatacgccatgtaaccaggaaaaattgggaaacacccatcattgcttgcgccatgccatgtgtagattacccataataatgtcaacgccagtaaagacccatcaatcatgaaagcaaaacgccagttagttgagataactcaaccttgcatcttgcccctagcgaggctccgaatagtcatttaaagcaacacaaacggaacctcgatgatggccgctgtactggcggatgatgttgccagtgccgagctcccacagacgggcgtagtgatcactggagacagtcacgaggtatgcactgtctgcagagaaagcgcagtcccaaacccagcgctggtgattggcgagggtggtctctaggaacagtgtgtggttgactggatccataggaggcccgtcgggggatgaggtgaatgtctgttgcggtgtctcttggcgaggagggttgtcggtaatacggaggagatcacggtcttggacgggtgcgtcgaaaatgcgaagcagatcccgagattgggcgggaacctcgacaggggttaccggagcttccaccggtgctgcttcaactgtcgggttcaatgcctcattctccttccattgctgtaatgccagtttggcaggtggaaattcagcgtcgaggttccaaaccttggcagtatgatccgcagagcaagttgcaagatgcttgacatcgggagagaggagaacacgagtgagatagtccttatgcgcttggaaggtacagacggggatgattcgggtggtttcctcagtttggaccatgcgccacaagtagacgttgccctgttgaggtattagtaaagaatcataatatctgccgtgaaacaaaatcacgcaccttcttgtttccagcgcaaagcaaggatccatcactggcaacgctgacactgagaaccgcagtgtcctcctccggaatcaattgatgagtacagacactctcgcccaaatcccagacacgaaccataccggcgtggtcaccgctgatgagctcgccctggttaggatgaatgaccacatcattgaccggagcccgatgaacgtagtttcgctgcaagctaccggtacgggtgtcccagacttttacagttccgtcctcggagctggtaaccatccattttccctcgcagtggaatgccacgccggtgatgttgcttgtgtgaccttcgaaggtaatcacggggttaggattggttgacttgatgtcaaagagtttgacattgttatgacccgcagcagccaggaatctcttatccggggtgatgcaaagacgattgacttgggagtctggatgctggattgtacgtgaacagatacccgagagcgcttcccaaaagctagcagagaaatagtcagcaagagtcccggtatgaattatcgctctgtgggtgctggataaacactgcacgcagctaactaagtgccaacttaccgaatggtatggtcgtaccccgctaaaatatgcaaccaaggtaattagcttaatgcctagaagaatgcggggagcttcttatgatattccacttaccggtgcatagaatgacactcatattcgccttagttgggttcaaatgaatgtagcggggaagtaattgatcttcgtggcctcgttctgggtacctctggagtcccttgaggcgttacgggagctgtcaaggcgagacggcccagaccgaacgtaggatggagtcccgtttactgccattaccaccacgtgattatagatccacgtgagcaaagcggtgtcgctgtgtgacgataaggcgataaggcgagggcggtaaaaaggcggtgaagctgaaagggcaggcggtcaaaaaggtgcaaagaactagttacgcattattgcttgtctaacaagatccgttaatgattttatagataagctaataactctgctctagaaatttgtctaattttatacaattgaacaatatcttgtgtgaattcttcgtgttgtcaaacttactctatctctagtccctgaactagattgggcggtacgtccagcggtgctcggagttaacatattattggccaaaaataagttaaatctccagcagaataattgattggccggcagaaaaaaaaacataccgatgtagtcaaacaagtatgtatttgtcgtctctattgagctgtattgatccctattggactccattgtttggtgtaagacaatagaaatgtcactttctttgttcttgtttgcttccattttgcctgtctatgagccctaattccctcctcggttattaccatccctcctctttgatccctccacaacatcttcttgttttccctaccctcttcaatatttataaacttaatgctcatttctaattacaatggctctaattgaccccaaccagcctggctttgggcttgaccagcctgactttgggcttgaccagcctgctttcgaccccgaggcctttctcaatagcctcaccagtctcgatgccaatgtatcttctaatgcttctaatgacttcgagcattatcaaatccccgagctcttgtgcagtttcgatgaatttttcgccagtattcctctcgatgacctcgatcagtctggttttggacagtccagttcagccacatctgtcaactgctttacccaaccactatccagcaacatccctgcccaggcaccctacaggcagatgccatacgacccctcgatcggtattgcatacacctcggaggacactgacgcctccaaggtccgaagttgggagaacctcatcgcccaggccaatttggtcaatgctggcgtgccaccctctactcctcagatcatggaagaggagacagccagccaaggcctccagactatggactcgcccgactctctgttcaactctcctggcacccagtctgtcgcgagtgtcgagagtgtcgagattgttgagactcccagtcccacctcgtcgactccttgccctccccgagctcctgcagctacaactacaccttcgaatgccgcgacaaatgtgattgtaagttcttatttatgattgaccatttcattagaaatatgtcctgactgtctttcacaggcaagcgccattcctagccccaatcctcgcgccgtgcagcttccgcaagcgttgacgaaccagaagggctatgcccaacacgtttcaccattcgcacctgttgcaacaattgctcctcctatctcctcgatgaactctcgcgagcttgagaacgcgcgcgctcgaattcagaccttggctagagaacgcaactactaccaacgtaatttgcggaaggcgaccaatattgaccctaaatcgggcaagaccagtcttcagctgctacaagcggagaatgtgaaccttcgtcgggccaactccaagcaatcccaagaaatccagagaatgaagaatgaggccgaagcagccaaagtgtcgtatgcgacactggctgagtactacaacgatagcctcaagcagctgcacaaagcggagcttgagttggaacagctgaggaaataggaacccaagtcgtatgtagctttgaaaagatgttcacatgcccaacatatgtcttctgagacgcaagtgtgtccttatctttgtgcttagccttcctccgagactctttctacattgaatacaactatgtcttatgttttctctgcccttaggatttctaggatctaaaagtcaaccataaagctccatagataatccgtgattgagttaatttttgtactaggcagcttcccagtgagaactttattctgactgttgatcgatttcaactgtgatatcacatagaaagatcagagcgttgaacaaaacaaccatgttcctcattatacaaaactgtcgatacgagtgcaaatgcctcatattgggcaacatcacgaagtaacagcacggccagctggcccgacggcaaggcgcttaactactaatcaaaagattaaaggtgatccctacgtcggtcacctttttttggtttcctagcttatatgacccactagtcaacatacgtcatgcctgaatatgtatctcgtcatggcggattcgaggagacccgtcggtctatcaggccgaacagcctgtcaccggattgcctgttgctacgaagtaatagaagaagcccggaagtcagtatccccatacttcatcttcatccttcatgtttgatgcagcgcttaacaaagcaaaagtactaactccctcacagaattgagaatactgaaccgagatgtctgataaggataaagatatcaaaatccacacatgggatgggcccgatgaccccgagaatcccttcaattggagcttcagatacaaatgggtgataacgattaccgtttgcttcatgtaagaaatgccatctcaacacaaaatacataattttaagcatcaaaataacatcctcaccagctccatcctgacaggaatccccgcaggaagctacggctccggcaacgactggttgaagcaagaattcaatgtccaaaacacccccttcccaaacctctactgggccaccacttcctggaacatgggcgccgccttctggccactgattttcgtccctctgacagagtcctccggccgcatgccaggatacttcgtggcgtatatactcctcgtcatttcgctcttcccatccgcgttcgcaaagaacttcgcgacactcatcgtgactcggttcttcggtggaggtgcttcttccaccgcgattaatattgtcgggggaagtatctccgatgtgtggttcggtaacgaggctcgcagtctgcccatgtctatattcggatttacgagtgttgtcggtatttcacttggtccatttattggatcttctattgtgcagattcatagatcacacccatggcgttggtaagcacaacttgcatttccgaatatcaatttccaaaatcccatcatgctgaccacctcccacgtaggatcttctacatccaaattatctacaacgcagccttgatcccggtcttttggctaatactcaaagaaacccgcccagaagtgatccttaagaagcgcgcaaagaagatccgcaaagaaacaaacctccccatctacgcctcttccgaactagatgccccaagcaaactcaatctcttgagactctccttccaacgcccaacacacatgctcatagccgagccggtcgtgaccttcttcactttatggataagtttcgcctgggggatcctgttcctcttcttttccagcgtcgtgcaaacctactccacaaactacaactggggtacgatgtcaacaggcctgatacagctcgccatctcggtgggtgcggtcatcgggacagtcatcaacccgctgcaggactggattcatctccgctctgagcggcataataaagagaacccggggaaacctatccctgaggcgagactgtacacatctatcccgggtagtctgctatttgcggcgggtttgttctggtacggctgggctagtcagccgcatgttcattggatcgtgccgactatcggtgttacggcgacagggattgggatctattcgatttatatggctgttgttaattatttgactgatgcttatgagcgttatgcggcatcggctttgtcggctgcttcgcttgggaggaatacttttggtgcgttcttgccgcttgcttcgccgcagttgttctccaatctcgggtatggatgggcggggactttgcttgggtttattgggattgcgttgtctgtcgtgcctgttgttttggtttggaaaggcccggagattcggaggaggagcaagtttatgagggaggcgatgtgggagccttcgcagaggccgggctagattgatcgtgggaggtaaatatgtatagagtaaacacatgaatttattgttttattttgttcttatgtccatctaatggccattctctattgtaaaatgccaagagggtagtatagaaagacaagaaaccaaaagccacaacttcctccacatgttctatcaactctgaatccaaggtgaaaaggatagtggaagagggtatcggggcaaaggggtcaaggtcaggggggaatggccgtccacatggatgttgcttttgggaaatactttcgctatcaaacattcaaccacaacaagcacgaaaattttatttttcagcgcgcatggtgcggaagaaatccatgacactagtgtaaacaacaagcaaaataccaccaccagggccgagacgcaggaccttgggcgtgaagcccttgtacagagcagcgaagccctcctccttcatcacagtaccgagagcaggccaagcccagttgtacttggcgacctgaccggggaccttggaagtgttctggatgcgggacttaacaacatccattggggtgttgacgacagtaccgacgataccaccaatgctaccggcaatcaggtcgttgcgagtctgctggttcttgttgccgggctcgacggcgggcagctgagcgcggacctggaagatacagccgaagtaaccggcgttccacagaatgtggcgccacatggtcgactcaaggccgttgtacattgccagcgggccttctgcggccacgatctttctcacaacgtcgatcatgccgttgtacttgtgggcctgtgccttgtcctgaagacggatcttcaccagctcaaaaggaaccacgacaaaagcttcagtagctccggctgtggctccggtcagggtagccagtccttgggtctgcttgtccacaccgaacaggttgcggtagaaagcaccccagctgtcgttggcggcgaacttggtcgcacgcttcggcgcctccatcaggatgggcgcggaaataccacggtatagacgagaagcactttatacggtgtcgcatgttagagagagagccgtggctgcgtcgctggagtgatgacatacccctcgttcttgacaatcttacggaagcagtcgaacatgccattgtagtaatccgcaccgggaacagcgggtccagactgaagctgactgcaagaggatatcgttagcccgtgtcatataaagtccgtgtttattgcgaccggcggcttgcttacattcgagtcttgagcacgtccagagggtacctgcgagtcacatatcgtcaattgggtccaattttcacactgtaccaagcatatctccaacagaagcacttatgagaccaaggaaaggaagtggatagccgtacatgatcaggatctgctcgtgcggggagacatgttagtcaatagaacatctcttggggggggggggggggtccgacaggaggannnnnnnnnnnnnnnnnnnnnnnnnnnnnnnnnnnnnnnnnnnnnnnnnnnnnnnnnnnnnnnnnnnnnnnnnnnnnnnnnnnnnnnnnnnnnnnnnnnnnnnnnnnnnnnnnnnnnnnnnnnnnnnnnnnnnnnnnnnnnnnnnnnnnnnnnnnnnnnnnnnnnnnnnnnnnnnnnnnnnnnnnnnnnnnnnnnnnnnncgggggggggggggggggggttccgacatgacgaatcaagtcggtatcgtttttcaaagtagaagcaaaagatacatacctctgagacaccagccaccgcaccggcggcgaactggtagacgaaggggaggggcttctggggagtttcagacatgatggcggcttgagctgggatgtcagtacggggccttaattgggtaatattgggatcgaaaagtcatcgaaaaacacagctttgcgatcagatcacgacatatttactcacaagaccttaaagaacgagggctggagaaggaagaagtgagaagagatgaggttgccggtgtcggcgagaatcggtgatcgggtccgagtgcagcagccggtaagcctccgcctgtacgtttagcccgattactaaacccccgtggggagagcttctataaaattcacattccgaactgtttgcagctttattgtcataaattcatgtgcatcgtgtcttctcctgtcttttttataacatccaaaatcctacacacatccccagcgtcatccccaacatcattttgctaatccgatgcactacaccatctccgctagcagcagtcgcagtcgcctgttccttggtgacagttgtcgcagatgcggtgtctgttgcagtacagctagaaccacaagcgaaccccgtgggacagcatcctccacccacggtgtcggcacaacggaaccagccctgagcgcacaggttcccaccagaacgttccgttgttgtcgcgacgggcgctacaatcgtcacaccgtctgatgtcatagtcgtcgaagatgtggtcgggcatgatgtcgtatcgcagtctcgtccagtacggcagcagccaccttggtagacagcggagcaggcatagaaaccagtcgggcagacatcgctggttactgttgacaggttcgtaggccgtgctggtggtgccaagctttcgtctgttgtggatgtgccgctttgggaagaggttgtcgaggaagtcgaagtcgaagtcgaagtggaggttgaagtggaaattgaagtggaagtactatccggcttggtcgaataggtcacagtagacaacatcacggtcgaatgaagagtcaccgtaataacagtgatgtatgcgcctactcaaccaatcagcaaaaggttcatattcccaattcccatcaacaatctgggaatattcacttacatcctccttcaacacaatcatatcccgggatacaacacccaccccccaaagcctgcgaacaagccgtatacccactctcacacgacccaatagtcccagagcacgtctgccagctaggacagcagcccacatcgccgttccctgtatcagcaacaatctcgcacgtctccccggacccacagcagcgatcggatcgaccgatggatgtgcaccccaatgtcccagtcgggcacttgaaatctcgtttttcaaacaaattgtttgcgctattgttttctcggggaaggtactgactgtattcatctgtgctcggggagtaagatggcccgaatgggtatgattgggccacaaagcgcgctggtgaaaatccttcttcctcggagaagtgtcgctcagatatgttacttgacgaagaggcctctccaaaactccagtagtcgaggaagaatttctcgccttcgttctcgctcattttcttcacgccgagagctggtcctgatgcgagctgggatgctatagcggcattgcgctgtatgacgatttttgccggcagcgatcgcgtgttagtttctttggattctcgctccgcagagggatttgtattttctgctaagaccagtgttgcaaactgtggcagtgagcagaacacggcgagggcgtggaggagctgcatactgcctcttgggtatcgcgatcaggatcgatgtcgagtttgtttaggctgagaccagtgaaatcagtcgggttgaaggctaacttgcagttcgatagttgtctcaaatatgcgtttgtttcactaacaaaagtagtggatggcttggttgggaatgaaacttcgagttgagttgatgcgaatatatattctcctttaagattcaatttagttgaattcgacagatttaatgaaagaggctttgtcggactaggaataattaagggcgcattgggctttctataaagctgcatataaaggtggctgggaatgcacaccgctacgcattagcttgcagaacagacatgtcaagatgtggagtacaacaacaagtcagtggaaacttttttattggctgatttcggcattgaagattattctctgtcttggtcgacgtggtacgatatcaagagacagactacttccacctaaccaaataagaattatttaacaccgacttcaaaggtgctcatatcatttgcaaaatcaaagactaaatgctagcagcacaccacagagtatggcagggtatcgtcagtaaatgacatgacatgggaggctctcgcacaggaaacacgccaaaaggtatcaacggaaatgaaagaaacaaaactaaggcctcaatgcaatgtcgaatgcagcaaacaaaaacaaaagcaaaaacaaatacgtatggaaccaatttcacttgcacttagcaataaatgattcgacatgaaagctcactgggtcggggatgatcagaccgaggttgcgtacaatacgggatcaagtagagggatgttcggggtcagctttgtcttcctcctcaggcgctgtagggagtggcttgtccgtgtcagaagatggagacttgggctcttctgcctcctctgcctcatctccatcctccggtttcgcctcatttccaccttcttcttggtcgtcatcgcctccgccctcgttgttttgctcagctgcctgctcagctgcctgcacagcagcggcctctgcttctgccttctccatctcggcattgcgggcttgctgtcgatcccaaacttctttacggatgcggtcgtcttttgcagtacgaaggcgctcagtctcctcgaagccaccgctcttcttcaatttgccttcgtcgacaaatgcaccaagttccttctggaaaagaccgattcgccgagtctcaagttccttctttcgtgctttctccgctcgctcaatggcctcgagtcggctttcgtggtttggttgcaaagcacgaacttcacccaggacaccatccttggctttcatgggatcaacagttgggtcaattccaagactcctggatggggcgcggacagcggtgctaccggttgcatttgtcaagacctgctccttggtagcttgctccaccagggcaaaggtctgagtcgccttctcgagatcatcttgcaagtcggcggcgagatcttcctgcatggtaagctggtctcgttcttcgcaaaccagttgtagctccttttcccagatcttggtccagacgggcttctcgcgagccaggaagtcctgcattttcttgatttctttcatcaccaagctaatgtcacggccgacaccttccaattgtcttggaagaggacgaacaccgcgggtcacaacatcctttcgaagatcctcaaccaaatcttggaggtcatcgacgcgagcgaccagccgctccgattcaccggcaagttctttcttaccagtgttgacgcgagcacgcccagcatcaccttcataagtgggagtggaaatgtcactagcaacggtcttgaccttgcttgccttggcacggactgcgctcatagaaccggtaatatcggatgtaaagttagagtaggtctgacgcaggacagccaaatcacgacgcaagctctgaagctcggcgatttgagttccgctacccacaatcgatgccttggaattccctccaacggcagccaggctagaggttgctggtggagcagcagacaaacgagcaatttctttggctgcttcaagctgacgatctgaaacccgctggatgatatttccttggccagcaagcgtctctttaacaccttcgaccaggaggcgtacgcttccgaggccgtcgtcgaaatgtttctttacctcatcgagattgtcaacattaagcactaacacagaccgatctttgacatcggtaagatcttctagttcatgtcggatgcctgaaattgggtcttggatataaatttctggcaaatcaacgccattgtcgtgggtattccaggcaaatttttcaataaaagcaagctgcagacgcccaatggtgagctctgcaatgccatcagggagcacatacttcttaattttgcttttatattgtaggaacagcgtcagctctttgcccggcgaaggttgctcagtagcaaattgaatagctgataacggtgttgcgatctcggacagttcaaaggtgtcctccttcggggtttgcggtgctggttttgcggactcaaaagcctcttccaaggttggcttctcctggggtagggggagaatcgaaggaggaacaatggtagattccacagtatcatctttcaccttatgagcatccggttcatttggcacctcgagtggtgtgttgtcgatctcttgtggctcaaatggaggcgcaggtggaggagtgcgttcttcttccacgacattcggaatatttgcgggtggaggagcttgcgcaaccttagcgacttcctgtaaacgattgttggatcgttgtcgtgtatgagtaaatgaacctcgcagacggactgcgttcaaggattcgcggacatcacgaccgcgattgggaataggagagttctgagtaggcaggacaggaacaccatttgtagatgtacctaaatgtttctggatctgataagcggagaatcgacgcgaggcacgtcgctcaagctctccacttctctgcaaagcccccaatgcgtcatcctccttcggcgggggtggaggtggaggcgcagaaaacccggtgggtgtaatatatgaaggtgcagtggtgttcgatgtgttggctcgaggggttgtatcattatcgaagggcgtgggttgagacagcatttgctgggcctctcgtcgcgatagttctctttcggcgtagttcgtcgtccgcggttcggttatcgaaggtgccgaggatgttcgagcaatggacggtggatcctccagcgatccgctgccataccgtctgtttgatcgtctgggagacgactgggatgttgacggcatggtggatgctgcagcttcatcatacagttgacctatgggctgcccactagcgatgcttcctgcactggcttgccgtcctggtgcggagcggccatcttcgcgctggtgccgggaccttaagcgagcttgcttcttcttcagcccttttaacaagttgatgattatatctcgaattctgggaaggtatctatcgaggctctgggaagatgcatcttgactaagagtgtcttcaagtatggtgcgcagcaggtctggtacgggaccgaggtctgaagtgtcgactccgatggcactgaaggcgcgacaggccaaattaaattcatagcccaatcgaacgtatacatctgacacgtcgttctccgatgcttgctttcgagaccattgggttaaggtttcgaggagttgttttgtcgcaaccaagaggtgcgtcacgctcttttcgatttgggatatttgcttatcgggctgtgcggtggggggaaacaccagttcattagccaccgtactgtaggcaattaacaggccgccatagtcatacctgagtcttgctagactgagatcgcgccgaggcggaggaactgcggccggactgctgggaagccatggatgtgtcggcactgccagaccccgagggtcgctcgggggatgcttgttgaaccaactgttcgggataagggaactgggctcttgacacgtctgaggactgcatgagtatgataggccaaatttccgagggagtgagaatagaaagtgagaaatagggcagaagcgagtgagagtgccaagcatgtgtgaagatgatgcccagcctcctgtcaacttggggccttaccgcacgcgaaccgatgatcagtaacggttcaaccccccaataccataaatactatatattactgtatagccctgtaatgatgtacaagggaccggacaacgcgttacccgcctattcaggccacagtaggtagttttatgtagctagtacatatatggactcgtgctattgatccttgacaattgcgaattggcctccaatttgatgccatcaaatcacatgcttatgctacctgcattttaagaatcaaaatacatcgaacatctacaaatacaacaaaacatcatccctcaccgcatccactgataagtacccgattgataagacccttgcctttgtccttcagctccactctggctctatttatattcctgcatgttgtacggagacacttatttgtgttgtaggatgatgggccaagtcatttgatcgtattcctacatcattatttagatctcctgtgtaggactcactgctttcttttccataggagcatgaatatcaaaccaagtatggtacctgctaaccctaatatggcagcccaaccaacttaacgcctaactccatcccagccacagaagtaaagtagacttcgacaataactaggttagaactgaagactggaacctaaggggaaaatgatcattcctgaagataggtgtttacctgatttaccaagtccaaaggggctaatcaacgttcgaatccaacggaggcacgaacagacattgggccatagccacttgatgagttttcttcaaacaactttaacaaatatagatcagcgatctaagctgtgcggcttccactatcccggtgatccgagacaggaactactacttcagacgctaacgatgttggctccgaatggtgagaataaactggaggccgcaaccctatattgtatgcaggtacctacctaggtatgtaactagagccccagttgattacatgcataagataaattcaacacctaactagttagttagttaactaactaggcacatggcgaaatataataatcttaatttgcggtagcggtacgatatatattcgacctaactaggtagcgggcctagctctgaccgttataaaatggcagctaagacaggaaagccccacccgacagtggaagttcccatggaaccaaatatgtatcgtgactctggacctatgacctcaggtatgacatctggagctagtcgacggatggtatatgtgtatatatagttactctactaggaagtgtaactgaagcaagatacgaagttgcataatacctagtatggacatatgtacggagtatgtatgtgttgttatttcaactatgacacaagacctcgggacgtaattgaccaacaatgcagttgatcgcgtaagatgatgcatacatcagtacatttggtacttccactactccatagctgctttatgcatcggaagtaaataaatcttaatggattcatgggttctgaccctagatcgcacaatgccatctttctacctttaaactctatggacatgggagctacctcagcctgacccgtactctgtcagtaacattggcaattggccgatcctagttggaggcccaatagcacagaatacttagaataacaataccgattgtccatttgacaatatccattgggacatgaagtcaccaagccagggaaaaataaaaataaaaataaaaagggtgtaacacacaaatacaataccatacgcgtgacttctctccagaatccctttcttcccctatcaacttgcaacaagcccatttctctttcttctatttctctgtctttctttcctttcccttccattccccttttttcatcctcctgccattggcattccggtatctccgcagtgtggtggttgcttatccttccccctcactttccccccagtcctatttgtgcaggcggtgtgttgtggcatcgtgcctcatcctagcggctttccgccgagcgaagttccacgacgcaagcttgccctgactgacatcaaagtcaatcaatggcctccgctcttaactctgtgccggctaatcacgcgtctggcaatgccagcgcgggtgcccctagcaccggtcgatctaccctgagatccagtaacagcacgaaggggtctgacaaccgacgacagtcaggcagccccgtcgatggcggacaacggtatgatcagcccttccttctacacaaatgtcaaatcaaatcctcgtgtaattccatatcctctcggacttgggaaactcccctttgttattatcctacccttcccttgtccggctggcgattgagctggtgagctctgttgcatgcctgcttcgagttgtgcgccagcaagagccaattgaagctgtcggattcgatggcagaattgttttgtcgttctctgcttcgtgaccagtggccactaacgcaagcatgttctactgcataggcgcacaaactcccacaaggcctggacccaagggaccaaccccatcactcaacgatcctcatacactccatcgaacggcaacatggcccaccagaaacagtctgggtccccgagacccaaccagaaggagtcaaacactcctgataaccatgcccatgaccgcctggtcttcttattcgccagcttcattgtaagcctagtcgcgccaccatacccgttgatcaattctaacctgctacctagggtctacacaccaccattaccaccaaatccggagacaagtttaccggtatcttctcttcgtcgaccatggagcctaccgaactttcgttcctgctcaagatggtccagcgaacctcgcaagaggcccaaccccgggcaaacggcgtcagcgatgtcgcaactccgtacataggctccgcgcccgagcacatcatgtcattcgatatcaaggatatcgccgacattgccgttccaaacgttaccacagccgaagtttcagccaaggaaccaaatggtacgggttgctttttttaatcggattagtctgtgcatatactaacctagtccacaggtgcttcccagggtttcagaactgacagtgatatctctggaaacttagccatgcgagagcggaccctgcagcgctgggaacctgccgagactgacgttgatatgtcactcgaaacaagtaacacttctgcgggatgggaccagttcgaggcaaacgagcgtcttttcggcaccaagaccaactacgatgagaacatctacaccactcgcctcgaccgttcggatcccaattacaaacagaagcaagcggaggcagcccggatcgctcgtgagatcgagggacaagatgtggacaactcccacatgcgcgaggagcgtggccttgtagcaccggatactggcgaccaagacgaagaagacaagtacagtggtgttcgacgcgaagacaaaaccttccctcccctgctttccggtcagccaaacaagtacatgcctcccggacgccgccaggcagctccccagcctgctgcgacgcccactgcacccaccaaacagcctgttgcttcccctatccccatcccatctccggccgtggccaagggagttgtaccttcacaccagcaagctgagccggtcgcatcgctgcagcccacagcagatatcgagcgaaagagtacctcgggcaagggcgtcattcccgcagtacctactgtatccgcagtatcagctggaaagcggcctgcacctgaaaatgcgactgcaaacgtggaggtagaggtgctggatcatttccgacagttcgcgaatagtgagaaaatgaagatgcaggagcgccgtcgcaaccaagcctcatatgaccgaaccatgaaactcaacgagctgctgaagttttccaagagtttcaaactttcgactccggtgccgaaagaccttgttcccatcctggccaaggaccggcaaaagcaggaagcaatcatgcaacgagggctgcaacagggggatgataaggcgataccgaaggtcactacacctcccacagaacagctacctgttcgtgccggacctagtggatctgtacccccatctgcaccagctgatcgtcaaaactacaaccgcacccgtcagggttatccgcccactgggcctcttgctggtgggagattccctcagcaagtagttccgcccggacgtcctggtgttggcatgctcagccatcgtctagcggacaatctgcagcaacgaaagggcgcgggaatggggcctgtccccactcctcttcccattcaagatgctcgtggaacacccactggtcctgccagcgaccagcagagaatcaccagccctgtcaagtcacaggccgggtcttccgcggcaaccaagttcaatgtcaaagctatggagttcaagccaaaccccgcagcgagcacttttacgcccggttcctcgggcgctgctgcaagcccacggtctttctctcgcaaccgctctgtgtcacgcgccacaacgccaactgcgttcttcggcccaaggaagccactgcctgtctctgaacgaccctcgatcagtgatcagttcaatcccatcaagcgcatgaagaaggagaacgcagagactactgaaaggttgattgtgttgaatggaggtattccaccaccctacaagactttgccaacttgggacatcgcggatggcagcgaagataagacgtacgatcagatgttcaaacagcctgttggcgtgccgacagtatcgcctcagggtcggtccgcctcccacaacaccaatattccccagcagcatcagctgcccttccacttccagcaaggtaacccagccatgccgccatcttctggtcctacgaatggaccccatggtcttcactctcagggcccccatggcccctcccatgtggatgatcatcaccgcatgcagttgtccgcctctaactcccaggttttcccgtccccgcggatgcaacatggatatccgtcccctatggcttcccatgcccagctttctttcgcacaaccggtccctcagttttacggtggcccccaacccggtcacatgagacctttccagggtggtgggcctcagtttgtgaatggcgctcctatgatggtgcagcaggtctcaaatggaccctacatgggagtcccgcagggcatgactccgtataacgcacagatgcccatgtactccccgaacccgggccacgcctacccccaacatacacctcaaccgcatagcgggtacccaagcccgagccgtggtgcaccgatgatggtgcaccagaactcgcaatccggacagcctcctcaatcactaatgtttatgcctggccaacccggatatccccagcagtccggacatagtgagtgtggctacagtcccccatcaagcaactccagtttttaaccaacccagtgcctcccaaccgtggcaactacccacagcagcctcacttttcctcaagccctcatcaaccgcatcatttcccacctaaccagcaccggacacccagcaatggcttcaaccaaatgcctcaattgccaccccaaatgtctgccaataccccagccacaacccctggagcttcccatccggccgaggcaacggatgaaggaaaatgaactacacgaatcatgaagccgtgagcggccccctcaaatgatgctacatcttattgcttagctgtgacttgtccgtgctctgcattatcggcaaccgccaaataccccggttactcttccatgaccgatcctcatctgttttccccgtcatcgacgcggtcttcaaaacatttgaattctgcggtgaacttcatgtggtctcaagacttgctcggtgagtgaacagtttcgtagtcttgagaacatgcgagcaacacccgctaaccacgtgatcagacatgacagatcaatctactagttgtgcctatctattttccagatatcgatctggtggtgtacatggaacgaatttctaggcgatgaacccgttgaaatcgatcacttgatatccgacctagctcatcgttgtatgcctactagtgcacaacatctccacatacgtcatcgtcgagttgaagtcttgagggtttctccatacctgagatggcctcttccttctgattctctcttatccagtttctttttttttcgtttatctcttctcttgctttcttctcggttgttggttggagggctgtgtgtccccttggtgggctcactggcctttctacctttgatggagggaagtgaggtctgcggtgggttgcgttacggcatggagacaatgcttggtcggatggtgatgtgggtgaaggtgatcggtctgggcgagcaagcggagcagtgagacgtggttgaagatgtgggaacttgataatagagatagctcgacccatggccaactggcaatgaaatggttatctcatgaaaatttctccatcattctgtgtagtcggccgctcatgcggtcgtgtcatgtctgtttcagatattctattcctcttctcggttttatagctggacggcaagcaaaggagaaaaaaagatgtgcagacaattctctatactatattataaattttgaccaaataaaactccccaatatcaccacccgtatccatattcaacatacaaaccaaatatcgggaattctagataactgttacagatgtcagcagctgcaaatgacctcatttcaaataaaaaagtagtcaagtacaggggaaaaagtctcctcaggcttaatttcaacagtgtcatcatccaagccacagacaccagacatcaacccaccgcggtgctttatcccattgcaagctcctctgaccacactctaggcataaacaagcctcagaacaaaccccctaaaccccaccaagcatcacaaaaaccaaccacgtccagcccacaccccaactaacacacctctccgtctcccaacttccaaacccccacagcaacatgcccacaccactctccacagcagatgaaaaagagaaaaggaagaagagagagaaagagtagccaggaatgacaattcctaggcaatcagagagaagactatagagatgtccgtatcccgcaaagccaacagaacgccgccagcaagaacacgtccaaccccaagccctcgcaaagaacaccataagaatgccatccagccacccaagtcccctcttccccctaatcccgaaaccctcgcaccctttacgccacagccattggtcgcccacccgtcctcatggaagcgaagcggacacggcaaccccagatagcggcgccacctccccgtttcccgcactttctcgcactaaagacccgacaccgtacacgctatcaccctaaccctaggatatgatcccaaggcggacctcaacaatgcaatactgctatatgcaatgatattacagtaattgaaagcgagatctcggcaatgagcgcgcaggcgccaagcccagctgcggccatgcctcgggacggacggaaatgtaaatgtacacaatgtctcccatgatccaggaccaacgccgctttgtccgacgtggccgcgagccatgggggtgctggctaggatctcgatgctgctttccagcaatccgacgggagacgtaagcgttctgctggaagagtggggggaatggtgttatgtgaagttggttatcgagagtgtgatcggaggagggtgtcgtcgtggtctgggcacagctctatggtggtgtggcaccatcatggctggtccaacagacagtagtctgctggaaagagatagttgattcgtgcgcacgaggtggtagctcttgaggtttgctcctagccggtttgtggtattgcgtgggttttagaacttgcgggagtaccatcggttttgctgggtgagtcttcttttgcggtgttgtggtcatggtctgaccttttaccagagttcgcatcattggagagggcgacttgcgtcgctggttggtgtactttgtgtacatgcatgggaaagggactggaaaacttactgtttgatcattagggttgtgtcgactggtatataggtaaatgtggaagaagaagataagtgctgtagcataagccgcgtaagttccagtgtcatttggcgacagaattagacgcgtgggacagtggcatggaggtgaagaaaaagaagacaaagcggagctttatttatatgagcacgtgttggcctcagacaacggtgtttatcacgataagggctatcagtcacgtgatttgggtgggtctccgataaggcgggggtgaaaggagtgtgttgtttgatctgccttgctatctgagttacaagcacactgtatctgatcttcgatcattttcagtcactatctcgacctattgatctaatcctgacagccgactgaatattgaacctttggccattggccgccccgactcgcgcaccccggacaccccaaataaaccccgacctgctacatcggtcacataacagccatggatttcctgaagtcagctatcggatctgccatcgcgaagggcggaggactcccattctccctcggtgacagagttgacatcggtgattcggtctgggcactgcacaacggtacgaaacgggtacggtggctttttggttccttcttccatgcgggacgagcttcaatggctgacgatgtcgtggaacatataggatgacggttctgcgtgcagtgtcttcgcatttgatgttaatgcgaataagtcgcgccttcctcttgcgaaaaatgcagtgcgcaagtctagaaccttgcggcatcctggtgttatcaaggttttggatacgattgaggtatacttggctcccggccctttggtatgaatatgagattatggcgcagacgcttacgacttgacagacggagcacaatctttatattgtcacggaacgagtcgtgccactcagctggccggtgaagcggaggagcttgagtgaggagacggctaagtggggtttgtatactgtggcggtacgctattcttgagagtttgatatcatagcattgctaatgaggatttctctggacagtctactctcaaattcatcaatgaggatgcttcctcagttcacggcgccgtgcgcgcatcctcggtgttcataagcgagagcggcgaatggaagctaggaggttttgaaatcctgagctctatgaaggaggacgatgcgattatatatgtgagttattctggctcaggtttatccagaaagtgcccggttgatgccaaatactgactctatgcatagacgtacggaagtagtgtacccgatgccggtcgatacacgccaccggaagttgtcaaaacaggctgggatactatcaagcgcaaccctttgacagcagttgatgcctacgggttaggcatcttgatcttcgaggttttcaatgggggtttctcaggcagcgaccaagctggcaagacgacgaacattccccccagcatgcagcaaagctataaacgtctttgcaccaccaacccgaaactacgactaagcccggggcacttcgtggaccagggaatgaagcagggtggattcttccagacaccactcattcgaatgactgaagatatcgacagcttggggctcaaaagtgacgccgaacgtgaagaatttattaagtacgtatattctcaacatgctgcatataattatttcttggctgacatatcacgacttgcagtgagcttgataatctttctggggacgactttcctgaagaattcttcaagatgaaggtgctcccagagctactgaagtccgtcgagtttggtggtggtgggcctaaagttcttgtagctaccatgaagattggagcaaagctgtcggcagaggaatttaacgccaagttgactcctgttattgtccgcttatttggcaatcccgatcgagcattgcgcgtctgcctcttggataacctgccatcaatgatcgataatcttccccagagggttgtcaacgataagatcttccctcaaatggtaagctataagattttgggtaatgcacggtttactaacatgccatagacttctggtttcaccgatgttgctccggtggttcgagaacagacagtgaaggctgttctgactatcatcaacaaactcaatgataggattgtcaatggtgaactcttgaagttcctcgcccgcactgctaatgatgagcaacctggcatccgtacaaacactacaatctgtcttggtcggattgctaagaacttaagccaaagcgtaagtgatttatcattaatgttggatcatgtcgctgacattacatatagactcgctctaaggtgctgattgcagcattcacgagagccatcagagacccctttgtccatgctcgaaatgcaggacttttggctctgtccgcgactattgatgtatttagcgaggaagattgtgctgttaggattctacctgccatttgccctgggcttttggacaaggaaaagtgagtaatgcgctcggtccctaactaatggatagccctatacttacagttgaaaagattgattcgcgaccaagcaaacaagacgtttgatttgtatgtccaacggacacggaaatatgccagcacgatgccagataccgtgatcccccccgccgcacctgcagaagtcaacaaacccgatgcgcgtgttggcacacccaatgataactcctgggccggctgggctatttcttcattcacaaacaaaatcgcagctgctcacggcgagattgaacccaccgccagcgctagcaagcctgttgattccgatactgctcgctcggcgtcggttcctcgtcctgctaaaccatcaccctcaccctcaaccccgctcgaaccacgaaaacaagcactccgtcccacagctcagtccatgaaccggtcaatgtcagatcgcccagccccggtggtccacgacgagccagaagaagaaggcgatgatgtcttcgatgcttggggtgctatggacgacgacgaaaaagacgacgatccattcactgccgctgtagcttctcccaaccccagttctcccgtcccgtcatcgacaaaagccccagcggtgccctacgatgatggcggcgaacccgattttgccggctggctggctgcgaagtcacaaaccaaagcaaaaaatcctttgccaaagggcctagccaaggccgcttctaccaatgccgttaccacacggtcgacgataagcaacgccaagtctcggaatgtggtttcacataagaagattgatactaaacccaaagatgaggagggcgatgattggggagatgcatgggagtaatcgggaaacacctcgctctccttttttgattttccatgtccaatcccgtctaatgaaagtctagcgtgtcaatatcccataacctttgcatcgaggcgtgatcgttatatttgaactcaaactcagacaaaagatgtcctaaagatgacgctcatttgctaaaattgacgttggaatgtaactagcacttaacagagccaaccaagtctcaaaacagagtgtcaaatataaaattcgacttccaccagggaaagctccttaatgaaaaatccccgttcaccaagtcttcagtatctccccagcaacccgttctcccgagctaatagccccatccatatacccaatccacctcagtgaagtctctgtcccggcaaaatggatcctcccaactggagtacgtaaataagacccatactgtgtcaaaactcccggcggcatgaaagcactggggccaccacgggaaaactcctcaagatcccacctctgaacgaggatatcggtggcattttcaacgcgcggaccaaagagattagcaaaactctgcttgacttgacgctttacctcctcctcgctcgcagtatccagcttgcgcatctcgtccgcctcgatgaaccccattattgctccgaacgagtcatccgccggcgagttgtcgtatgtcactcggattgccccgatgtcgctcacaccttctccgttgagtccctcatcccgccaccaggctgtcgggaagatcgcgatggctttgccaagtgcccccatgggcatgcgctggtttaactgatctcgtccggctggtagtaggggatcgaatatgatgtggcttgctagaggtggggacatggcgacgacaacatgtcgggctgaaatattgacctcatctgaagagactagatagcgggattttttgagctggactttgcgcacgggcgtgttcaggtagatgttttgcgagccgagtctctcggcgagaagtgttgcgagtaactgtgttccaccactcacccgactatcctgtgcacccccctccaccccaatgagacggttgatggtcccaggccctgttttatctccagcggcagctatacaccacaatgcatacagcaaagacggttctctcagttcggtcgacagtatagctgggatggcaatatcgaggagaacgcgagagtcggcagtggataatcgggaactgacgtatgtttctagagtcattgaatccagcgccgtggcattcggggtattccatggtgcttctaggtcgaccttgctcgctagggtattgatgtcgttcatgaagaatgcaagttcaataagggagcctattcccacgggaggaataccgcccaaagtatcttgataatggtgaaccgtgttgtttcgatagaaggttgaatttcccgtcgtatatgtcttataggttgggaggccgagttcggccgcgagagccaaaacgcggttttgtgttggtccaacatattcgccgcctagttcttggatattctttcctgtgaggttgaagttgagtacgcgaccaccaactcggtctcgtgcttctaatatgacgaaggatttgttggccgctgccaggtctttggcggtggagagtccggataggccaccgccgatgatggcgacgtccactttggggatgaagcattctgcaaccagtacatggcaaaggggaattgctatcacgaagaggtgcattgcactgaaggatgacctgcagtaaattatccgcataattatccgtgtatctgatcgatggactgtttgaagtattactgagctatagcggttttttatatgtagggatttcaacggatggattcgatttatatttgctcattttaccaccgactactacccaaggttacaaagtacaacagaggtaatgaagccgatttgctcggcctagaagcaatgttttgtgattagagtagcacgagcgacagaagagcgcagagcagagtatagccctgtaggtgtagctattcaaacaacataaatgccagtaaaccttccaatatctccctattacgttattgttgctggcatggatattttgtattcttcttccgaaatcacatagcgaacaacatgatagcgacacacaaaaggaacagttgatgtctggcgctatatctccgtctccgagccttcttccgaggattcgcaggattcgtcttctgatgccgatgaggaggattcattacttgttattccactcgattcttctggggtttgttcgctagacgaacatcatcatgggtcgatggggatggcgttagtatcactgttactcgtccccttgctcttagctaacgtctatattaggtctgttcgaaagcgatcaggaccttgacgtggtcatcgacttgaccgacagtctaggtatcaatattgaccactgggaacacaacctagctgcaatggttcatcaaacagacattctggcaccagcaaggtcaattgccctctacagtacccctggatataccgatttgctagccaatgtcatcgtcccgtacttccgccagcagctcgacagtgacaaccttggagaacggctgttcgctgccagtcgcgccaaggaagcagacacgggcgacctctcccaagacgccaagtaccgaactatcattctaggtgctgtcatgatccgagctggtgctcgcatcaacgaagcggatctgcagcatctacgtgacctagtgccccaaattaacttcgactcgcgccaaatactttttgaataccatgggttcagaactccaggaaaagttcagtttctggctgccctggatcactaccagcccgtgttgcacgcagcttccaggagcctaggtgaattccctttggaagactttggattcagacccttcatgctaacgtaacgaccctaatagctgcttcacgtgtggaaaaatcgaggaggatatcggtcacgagcttcagcaatgcaagatatgcaaagttgcgacgtactgcagcgaggcaagtaggatacaagctatctttctaagttgtatgttcatatatattgaagcttcataggactgtcagcgtggccagtggcacaagcaccaagtgagctgcttttccttgagccaacgccggataataaacgtctgatcgcaccttttgatggactccaagaatactggggtaaatattctgatgtttctagttctcttgtgctagggtggattattacctgcatgtctgcaatatcagggatccaacattgcttgacatatcgatcggtgaggattgatattctcttctagcgattgattcggtcaatggaagttcaaattcaatttacgctctggagtcgtcctgctagaaaatatgcgccagcacgctacaaatgtagtagatgcatgccgtggaaaggagatagacctaataatatagacgcaaaggtcaatattagttggttcgtacaatttcttgctgtcctcgtacactccactttctctcggaaatcagatatctgcataagaattatgcacatccacttatgccgattatgcagcggcaccctcactccgccgatcccgtctttccacgacatcaaagcatcacacccgatgtcttccaatgagaagaaacgcctccgagatcgtcgctcgcaacagaatctccgcgaaaagaagctgcgacatgtagcccaactcgaaaaacaggtgatacactgcgagcagcatcacagcgaccaaggcgtgcagcgccttctccaagtaatcgaagggctccgcaagcaaaacgaaactcttctcaagcgccaaaagagcttgaaatcactcgtcaactcctgggagacagaactggatgagccagctgccaccggtgattccagccatgacttgtcatctctgtataaggagctgagcaaccgagaagcccgattctcccttcaaacggatttcaacgaatcgataccccagcacgggattagcagccttctaaacgctcccctgcccgctgtgtcaacatcaccgcaaatccgatccccatctctagaacctctttccgccgaaaccacgcctccgtggaaccaaatcccaccacacactgatgacttcagcacacgcaccatgatctcctgtccgtggttcatctacccagagctgataatcccatgcccagatatccccagttcccctcttgactttctgtacggcacgaaaacaaacccgctagcagatatgatccacacggccctgcaacgccgcccagtccgtgatccggagcgactgagtactggctggctgacttaccacttctcgagatgggtcatttcccccagcccggagacttatggtcgactccctgtgttccttaggcctgtgcagggtcaaatgaccgttccgcatccgctcgttttagatttcttgccgtggccaaggataaggctgaacctaattcggcgttggcatctgtatagtaaggatcgggatgacctgttcgggttcatggcttgttgtgttaagattcgatggccttggaatgagacgattcttgaacggaatgaacagaacgagttgtgtattaaaaaggcgttttatgagatgttcatgactgaaagtgggtgggggcttacgccggactttattagacggtatcctgatcttgtggaggggatggatatcaatcaaattgtgattgaacttttctaaggaatgaccctgttcatgtacagaaattcatgttctattatgctctattctattaattgtgtataggcaacttctatatgtgggtcgttaaacatcatcccgatcatgggaacagacaaggccgatgtggagcgaatagtatgcccttgatagtagcagctcaatccttttcaatctttaccatcgagatcaataggccacttctcccgaatcaccttgccatacttgatgaagacaatagggactgggatgaatgccaatgccaggaacccaagcaacgagttcccccacccaagacccagattaccgaacatcttcggcccagcaagcgggagcagagctccaaccagggagcgagtcgccgtcaaagtggcattggcggacgctgcatatttgggatagcaatcgatgatatatgtctggataggcatatacacgcccatcgtgccgactccgaaggggaacatgccaatgataggcacgatccaaaatacgtgcttgtcggctgtccagccgtaccagaagaagctgattggaaggatgcaggcgaagataatcatcattgggagacgcatctcgggttcgaacttgccgccgttctttgctgtagctgacatgaccatgcggtcgtttgtgaaggcgataattgcgaggccaccgataaaaccgaagccaatgccgagatatgcaagtcccgataggccaacggagaacccgtatttctgagtgaagacgctggggatggtagtgaagaagaggtagagaaggccgtaaacgaaggactagagatgaaatgttagtaattcgcatttcgtctatcacgaccgaacttggactcaccatataaagacacagaaggaacacaattggcgacttgacaaacagcaaaaccggcctcttgaaactctgcaccatggtctgtcccaaagtaacgggctccttatttgtgtcataagcactccgcaaatccattcggcccgtctccttcacgagtttctcggtcttccagcggataagaacttcggcatatgtctctttgttcagaaactcaacccccaatgacacgataccacccacaataagcaatagccaaaacacccagcgccagccagcttcctgtccgaggaatccacccgcgataggcccgaccacaggtccaatcagtggtcccatagcccagacggcggttgccatgccgcgttgctcccgggggaacatatctgcgatcacacccgcaccgagtgttagacaacccgagcctccgattccggcgaatagacggcagacgatgagggtctcgatgctgtttgctcgtgcgcagccgatttgccagaccacaaaaaaccaatttgcagcactgaggacgacgcggcggccgtagacttcgctcataggggcgagtagaaggggaccgaactagttccgacatgttaagacgggttggattgcataacttatagggtgggatgggctcactgcatatccgaggatatagatgctgacactaaaagacaagattgtctcatttgtttctccgaactccgctgccacgtatgagatggcgggtgagaacatgctcgaggccagcggagagatcagagtcatggcactgatcagggcgagcaaggtccattttttgttggccgggaagttttgggggttattaaggtcatcttgtccgtcccagcctactattccgcagctgaggtctgtttctgggaatatttctgtggttggtgctgatgtttcggtggtttgcctcgttggctgtttttcgaggtcatgtgttaggtttctgacgctgtctccttcgttcagggttggttggtttgaactggactctttttgaagagtatgcatcatgaatcacaagtgtctgtggaataatgtacaagagaggacgtgcttggcatgtgagagtatagagcagtatagtggaaaaagggaagaaccgatcaggtataaaagcaaaagccccaagacgatagatcaggctattatcagcgcgccagttttatccgatatatccaccgagatatacttcattgctgccttatattgagtcataaatgccattatgcttataaaagggattcataaatcgacaagcatcgcgcaatgcaacgagtatggacaatgtgatggcttagcgatgattcagtgctccacttctattgttcattgaccaataaacgctcttcagaatagccaatctccaggcgctgaatcattgtttggtgcctagtggggccactctcctctcgcatagaacctcacgtttatttttatcttcttgatcttttaatgcgcataattcattcggctcaggaggttgataacttgcgatttaattggtaaaatacaaggatttgatagcatgtgtctcatctcggacccctgtttgaaatagcctttggaacacagcctccatatcatgttcattgttccttctcggcgtcttcgaacacacttcatatcattttcacggcggaatcaagcacttctttgcaggacaagtaggcaccccacaataaaaggtagccatgtgttgccatactcttgtgcactgtcgggcttccatcgttcatcacatcatcattcaataggcatcggatccatacactccaggtagtccaacacatcgaggtacacttcttcaaggtaagctttggtaacatcctgggcgaagttgtgcatgttcttcaaccgttcatatctcagattgacaaaggctgttcccacatcactctcaacttccgccagcaagatcagcagcgggacaaatggcggaatccccatcttcatattcaaagtgtgggtgtaatactccatcagacggtgaacaaaccaccgggcactagagtaatcacatcgccggcaccgaatgagattgaacagaccgcttgagatatcctcatagtcctgtgcgggactgcgggtataaggcccaagaatcttctcggcccccatcatgaactcgtctgccagttcggctcggggctgttctttcgcaatcatgcatacaaggatcggattcatgttccacgctagccagttgcggacctcgatcgacatctgttgccatctcctagcattgggcgagtccctgtaagggcgaacgatgccagaatcaatgagccgatgaagtctgtgcactttcagaatgtggtagatgtcattgcgccaggtgaggtagtcggaagggtgtttcagaggacagggaaattggtacagcgtaaagcaagcgatttctggcagctcaaatgcctggtcggttggtccagtctgtttctcaaccagaagtagagtcgaccaatcgcgagtgtgctccgtcgacatcttggcgtatggttgtaaagatctttgtcgaccgggtgccccgttgttgtaaagtgagaggagaccccgtctggaactatacacaaacccaccatgttagctcatatttttttttcgaaatccttacaataaagactgaaggcttactgtattgatcaattgagtaaaatatctgactatgccacgggggcgtgtgttggtgatctgcacacctctcgctgtctttcagtcgatagccgagaatcagaggataacagatttcccacaattgagacgactaaggagccctgtagaccgagagaatctttcaaatgctgagatactgacagttgtatctgtctgtatgtttattaaaaggaattgagtcgaacagaagagaagtgaagggaggagaggatgaaagtcatgaagggtctgagtatgggacccagaatatactctcacttacgagcaatcccacatgagacatagtttacgcgggtacctccgagggcactacgtacatttaatccaagaataaatctactgtcactagcagtggacttgaagcagtattttcaaacgaagcagcatttcagccatgtatggccgatgagcatgtctataagtgaattgtatagttcctcggcctcaaccaggaccaccaacaccctgctctttcggtgtgaatatagttgtgttgatagtcctcttaatataagttctttcaatcttgaaagcatatgtattccgacaggaagtttgcatatgtccacgcagaaggttgttggcaatcgataggccttatcgttatcgtccccgccaatctcctaaccttgcccggtggaatgtcatggacttcttcactcccaagatcagcctttctctcgtatgtaccccttcatcagggtctcagtataccctttgtcgctgtgagtcattctccgacatccaggtaggacataacgtctcccaaatataattattgtacgctgacagaaccccatttacagtattcttgctgccttccaccgcctctcaggtcctcgttatcttatcacagaatgggaattcactgtagcccttcctaggccactatattgttgctacccttggatattccccggccgatcataaccgccttctcaaaatggaccaagaggaggctccaccacccccgtactcggccgtcgacccattactcgcacctgcgagcagtcggaacaacagctcttctcaggccccaatagttcctggtgcgattgtctccccaacgcaggatgccagtagctctcgtgtcccaatacagccgacggtcgtgccgacgcatttcagatccgccgctgcgtactttgaggaacggcttccctcggtcttggacgagagccgggatcttctgcaacatcatatgaccatctacccccggagccaggctaaggattttccacgacggccacggtgctgggcctctcgattagatgaggttacccagcaggactgggatacattcttaaagtatctatttccgccgcaattggggctcgctgcatcctctcagcatctcccacgccaattgcgagcggagattagacgagaccgcaaagatcgcccacaggagactgatgagcaacggaaagctcgaatcgcggccgttgtcgccgaatggaacgaatgctttttcgagctccgcgctacccagattgtctttgtctacgtaggcgaacctgattctgcaccatcgtccgctttatgtccccgatgctatccagcggcaacgggttcgatagatggccagccgattcgaaattcaaatgctccgtcacccgtgcctgggcagcacgttccttctccgactccttggtcgatgcctccctctatgttccataacccccaagtatatgtgcccccatctccatatggagtatatggtgttcctccataccctccccccatatctcctaaccaaccacctcaatactatacccacccaccacaaggcccatggcaatggaacaattggaactatacgcagcagcaaccgcagtaccccaataatggcacccccaaggctggatccggtgggtggatttcacagatcgcatcacaagcccagaaatatggagagcggttcagcgaacaggcgctacaatatggacggcaggtcgaggagcaggctattgcacatggccgctggattgaggaacaggcaaggcttcatagtcggaaagcactaatggctggacctccatacggtggtgggtactatcctcggccggcctgggataactcgcctcgtcccatagccaacattccgttgacacccattcaaagccctagccctgtgacaagtcctaatccgacgggtcggcctgagacaatcgatcagattgatagcaataagcctaagccctctacagaacaacttagggtagagccacccgcgaccgaacatactagacgagtatcggtgagctccgtgtcatctgagtcctcgttcagctcaattgactccatctcgacaacatcggacctgggcgcttcagaccttgccacagtgcgcacccaattggagcttctagacgatcgtcatgatcgggtattatatgacgccgccgtggacctccgccggcaactgtcggtcctgcaagagtcccgccgagaagccaagttctccggtaataactggcgagcaggtttcagccagagccaacaaaacagccaacaatccggcgacgccgactggggtcgctgggactcacctgagcagcagcaacgcaactcggtcgatagacgcgccatgaaagaagaaatgcgtgccactaaaaaagcattccgggacacgctgcgccgagcacgagacgagcagcgtgaacgcaaacgcactcgacgccgccaggtccgacaagctcgcgctaatgacagcgacacggcgaatcatatgccttcccagccgctagatcagcagcttgggacgttgcggctggaagattcgcggcaatttaacccgcctatgcctccacgtccagtcaccacacaagcacagcctagtccggtttctacaccgaatagctcgaatgtcggatttggatttgcttccaattccctctcccctgctatctcgcggctaagtatgcaggagtcggcacctactggagactctggcgcctttgtgaagaaagggaagccgggtgatacgtcaagtcggctaaaggatatgctcttaccgcgcaaggcgagaaagcaacagccgaaggacgaggatacgggaagtaaatgatttgcatatgtcttctcttctctttggttttatcttatttggttctattttcagcgtggtgtccaatgttttcttgggaggacggcaaaaatgaatttgctctgctcaatgcatagttcagatctcgaccacatcgaagtcgacgaagttacgattcacattgatacagtacatttgcgaaaactttatatatcgaaatcaaactttttcaaaaagatctcttatacatacaaagagcaataacccatgcccatttgagtctatcttcacatatcctctaagccttcgactcattcttctcaactaaatcaccaaccccaagtcctctcccaaccttaacccgaatcatcttctccgcatccttcttcccaagctccccaacctcttcgccctcatcctcgttcccttcctccccattcttttccttattattctccgcatcccgcttttcaatcgccttccaatcaagccacaagttctgaagattcaagcgcatagcatacgcatcctcgccgtcggcatagtacccgtcctcgaccttctcgacctcaaagccaagcgtatcgcggtacagtcgcagcgcagcaatgttcgacatgcgcacgtgcagcgagacgaaatgggcgcggtgagattcagccattgcgcgttctgcaagaaagaatggaattagaaaaccggactgtaattatatgcgaatatgcagcgtttgcaggtcgtttcaaatacaaatgcaaatgcaaatgaaaatgcaaatgcaaaatgtaaaatattagatataaaatcaagaatatcactcacgactcatccgcatcaacctctccgcaatccccaaccgtctatgcgtgcgcataacactcagactggtaatatgaccatgctgattcccgtccgtaggctcctcctccatcttcgcgagcacgtatccaacgaccttgggatactcgcctgagatattgccggccatgccgacgcctttggggccaggcttgtgtcccccgcgtggacgcacgaccgcgacgaagcttagctgcggccaggtcagggcatggtacaggtagtattttaggaagtagttctcgggtaggttcgttatgttgcaggtttggattgaggggaggaggtcgatgtaggagggatagctgctgagagggacgatgtcgaccattttggcggttttgtgcgcgcaggcgagggtttgtggtggtgagggggtggttttgggtgagggttgatggtggagttggtttgcggtgcggtggggggtggtcatgtgatgtcggggagggagctggggatgtagattgtatgtaggttgtgatggggagggttggattggctattttgctatggtttatatgttggttttggttttggtcgtctggaaatattttattttgatttgttcagttcgagtgaactgcgcatgtccgcttgttgaccatgatgtttatgaatagatcgaataaactacaacattgtacacaaatatgtactatatcaaaatcatatgcagtacaatatatgtacggccaaaaaaagaagaaagaaacctagcgccgacgaccgatccggtcatgcacccaaagtagtcatagatatcgtggaaatcagaacgcagacatcaccacctgcactcccactgccaccagaagcaccgtcgaaataccagcgatagagacctcgcgcagcgcgccagatgtcttgccacagcatttacggttgtaagtgacattgttcatctgggcagcgacctcgaagaccgagccgttgaaattgccgtaattataataatcgaccagaaggaagttgggaggactgccccaggttgctgttcagagttagcaacgcacattaagaatcaaacacatgtcaacttacagttacattccctggccattgcgcctagactgccactaccgttcacagcattggtctcgtcaatcgaagcagtattgggaatcaacaagctcagagagccgaggttcagctgcaggttcaaattgtggttggccatgtacatgcggttcttagcggctgtcacagacagaccgggtgggcgttgctgcgtgcaggggaaggtggggtcagtaggcgaaaatggcgtctcccacacctgcgagaactcatccatcagccatgggtacgcggtctggttggcttggtagtccatgaagaagactgcacgcttctgcctgaggatcatctccgaaagtgtgggccagtcgtccaggcccattgggaccttggtgggggtgtatatgaggtccttcagtccggagttgtagattggggtggtgaagttagcgggcgagacatagtcgtaattgccgatgatgaaggtcaccacgtcgtatgggttcttccgcatccacgtgttgacctcgactaggtatgcttccagtgtgccgacattgagcaattggcaggtcgtgtggcacaagtacattgtgccgttctcgtagtgcgtttggaattgcactaatccacaggttaataatcgcttacttctcaaaaggcaatgcaccgccgcttcacttacgcagccgaattccatcattcaattgtgttgtcacatccagtacctggttggcggcgacgctgttcttgcgcacgaacggactgttgtgtgctgcgaccatggtaatgttggagtacttcctggcacagaactcggggtagtcgttgcaaggtcgggtgttaacgacaggcgcttgggtagatgtactggtcctagtcgcagttgcgttcatgctattgttcccgatcaccgtcgttcctccgcctccgccgcccactagcaaagtcaaggagtcggaagtcatagtgactgcctgcgtctggttggaggcggtcatggtgccattgtgttgagtggtcgatgcaatgaccgacttgtcgccatcacccagtgtgattgttgtagtgaggtcttggtaggtaccggagggaatggcgatgggagtcgtgactgacacaatggtgggttcatcggtggtggtcttcccggattccgtagatgatttggtagatttggtggattcggtagattcggtcgattctgtagattcggcctgggccgcggcaacggcgaggaagccgaggacaatagtaggccacctcatcctatgtgatatgaagactctacgtctccaagataggaggagaaaatgacggggaaatactccaacttacctaatcggcacgtggaggctttgacgatatgacgttgaccaccaataaaggagaatgatgggccaattgtatttttatatttttctatcactttaggggggcgaagtggatgatttttagcctgggtctcgtgccgattgctgcctgttataaatttagtccttcttatacttttgtctcacatatagcggctgcactattattgtatattgctctatattattctactaaatctgcttattggctgtggtattgccctttccttgcttttcagctatctccatacctctatccatgccttgatgaactaatatagtccgaatgatcgacagcgtaggccaggggccaacaccgctagtgtccagccaccgacgatctcgtggcagacgcgacgatccgttgaaatttcttaaattttgaaactaatagaccgaataggcccaggaaaccctaggaaccctgggaaacccaagaaatcccttttaaaagctaaaaacaataaaacaatccaatcccatttgcctggaggcgatcgggagatatttcatggcctaacgtcatccccggagaccttaggcaaccctaattttcctcatctcctggggattttgggactttctctccttttcactcatttatcacatttctatcatgcattggacggaaaatggcaagcgaaagcttcctttttttaagtccactaccccaattgaccgccagcgaaagaccaccgttcgttggcaccgcctgttacggtcgctgttgtacttgatcgcttggatctttatgctactggtagtcattggcaacatctctaacaggcccgtcctacgcaatacctacttcctctacctcgatctttccaatattattcccgtctctattcccaatgccgtccttatcaactctatcgcccagactatcgggctgcatgacttctaccaggtcggcctatggaacttctgcgaaggatacgatgaccagggcatcacccattgctccaagccggagactctctatgcctttaacccggttgagattatcctgaacgagctgctggccggtgcgacgggtacgttctacaatatccccgcacccaacgactcccctggaatgcgaagactaacagctacacccagtcgctctcccatccgacatcgaaagcccattaaaactagcccgcactgcctcccactggatgttcggaatcctcctatccgcagcagtcctcaacttcgtcatgatcttcctcgccccgcttgccgtgtcctcccgacacccacggagcatcaaagcctgggccgcagaatacaacaacggccacccgcccgcgggcaagccaccccaccgccgatgcaccttcatctggttccgtgcgctgcccatgctgattctgacatttttcaccgcgctcgtgacaatcgtcgggtcagccgtcgcgaccgttatgttcgagatcttcgccaatgtcttcgcaaccgccgatccgagcatcaacatccgggcgcatgtcggtacccagatgatggtctttatgtggatcgcttcgggtttcagtttgttcgctttcatccttcagcttggctcttgctgcgcggcttgctgccgtggcggcaaggcgcgcaagcaactcaagtcggagggtgtcaactggcgcgagaagggttctctttcccccgttgcggctgaatctcgcggtgtctcgtcctgccgagatgctgctggtctccccgaggatggttccgggtctagtggtcatgcgttttcgaatgaacatgagcggaagctgatcaatgggcatgctccgacccagcatcattcttcgactgaacctcatgcaatctctacctgatctcgatcgccatttccctcaattttagtcatatccttaccctcctctccggattcattctcctttctaccattctcatcatctttggggtgttttttttttgccaatacccaccaacactgtgccatagtgctcccatttctgggcatttaccatattttatctaccattatctacttaggtacgattttacgattcgactgcgaagaactagaggctcgacatttcttgtttattacaatatccatctcacgaaacttgtttattggatgtcgattgagtagaaatatataaattctgctcttaatttttccactgcttcttttcccttccccgcattggctacgtcacagagccgtcgtaagctccaagtctttgccacgatcccaagtccctctgttgagttctgattcgttcattcgcatccaaccgattacctcccccacttatagataggcgtatctccactatagcttcctcatacacattatattacaacctatcacacagatcagccataaccgaagcgcacatcaaacacctaatccgtactacgtattcgcaatcgacccgaccaattgatcaaccatgccttggcaaccaaggataacccaaaatcccgaaaggaccccggggaccctgatcgggtcgatcgattcgatcgacagtagagcaatcaccacaccaaaacggaacaagccctaggtgaaaaacaccccgaggcattagtcgagaaggtacaaagaccttcaagttagtatctatgtgctgaatctcatattatacggagtccaatggaattctgcgctcagggtcgggtcagggtcgggagtgccgtcacccgcatccccgataataccatattgatgctgctattcctggagaactgcatatctgcgcattgtctgttatcagcactagattcatacaacagaatctgttcgctaattgttctatcgttcgaggcgcaaaactagtccagtggagaggcggcacacatccactctatctctggcccgtctgggctattgctgatccttctacatacgtatctcgtaccaatactccgtggacttggcatcgatggtggatttgccacgataggtggtgcgcaatcgaaaaatcgtggctgtaggttccatggtcggatacctggtagttcatcacccaggcaaaaccttccaaggctgcatatatgagaatgggtattcatggatgtaattctctgtctttcaatttcccgaggtcaacacaatctgacgaatacaaaataatacacagtgacgtggatcttgaccacgtagttttcactctgccactgtaaggctcttgtggtgattggtctcgaagacacaactgctgaggagcgggtaaagccttgggggtaagcttgccctgcccgtgaaagacggcaagccctacgtatctagactgggcatgcggggccccttctgattggggtgaacccacaaaaagcgccacgatgagaagtggagactccactcagtatgcaacgtccaacatgcatcctgatatgcctaactcattcaatcgctttgctggttattagttgagagcagggaatatatcacgctgcagaagctggcttctcgatgaatttcgccgcaaggctgtgcccggcgctgtactgtgaggccgcaggggcagaagacgcaggaacttgggggactagctggacgagtctggccgctgtggtcgaacttgaggttgccatgataatatggttctcggcataagcgagctgaacgttcaagaccgttgtatggttcaaatggatctactatatagttactttctatccttatatcccaaccacatccggatcccggcaaggtcgcccgtctcgggagccgggtccagacctaacttagaggctctgttggaagcgggggccaatctatacgccctagactatctaaagtagctggtatatgtgtcacctttgtgatacaatcgcctagaaaggaataacccccgaatagcctattactacaaaaacagacaccggagtgcagagaagtctagcagcgcgccaaggcctggcgcgccgagctgcaacgtgcgtgacacagacctcgtcaataccgttatcgaggatatcgccacgggcgccgtatacatagatgacctaggtagtcgcggcagccgcaatccaggggtagagagatatactaccgctatggtgtgaggatgcagtcgattgaattggagaattgttctctattatcccttaggcctaactagcgtgatctttctacagcagctactatctatctgcgcatcgaataccatacgctgtgagattacagacatcatagattgattgatagatactcggtatcgggagaaacaggtgggatattagggaagatgcaatcacattgcgcaacaaatgccaaagcacacagacgcagagaatagagggggaaatcaatttcaaaggtcaagtatagattctagacacaaatagataaaaacgacatgcacagaagtgatcaaacccatgctcaccacccgaagatgtggacaataaaatagctccagtcaatgagaaaggaagatcaaggaaataaacagggtatcgatatggaataaaaataaagccaggtgagaccgaaataagcacgcaagccccagagaaaaatcacaaaatcaagatgagaaaagaagagaactactcgtactgacatggatgcatgaagtaatgacaacgcaagaaaaatcgaggaaggaaaaaaaaaaaaatcatgagcccgttctcgttcactcctagtacgccgactgatcggtccccgtattgatacgccgtgtatgcaaaggtcaagctcgaatgacccaataagaaaggcaaaaacgagccatctagcccatctccatgccgtactcgtcctcctccttgaagctcatagcagcatggccagcactgttccagtactgcggctgaccagcgccgttggcactgctagtaccgctgtggaacgaaggactcaggctcggaggtgtcaggccggacatgtcgccgccctgcacggcatcgccggcaatgttagtgtgcttgggtacgcgtaaaccgctacccggtccgcgagtgtagctgaaggaagttgggtcattcctctccagtgcatcgaggatctcgctgcgcatgcgcttctcctcttcggtttgctcgaagggccaagttccacccaggctgccgatcagctcggcgagttccgcttcttgctggtatttgacatgtagggcccacatcagatcgcgagtccagctgacggcaccgttgagtatgtcacccttgttaggacctttctccttttcttcgattgggagacccattgtgatgttacccgccgtcgcacggcgaccgttgcctccagcgaggagagacgtggcggcacttccacctgcaccggccatggaaagagcggtgttgttcacaagttgcttccggaccttgtcgtcttctagtctgtgctgaggaaccaggtgggagagatcctgaatgcgttcgttgatattgtcacgtcggcggcgttctaccaggttatgcgaggcgcggcgacgtcggcgcttggcttcttgtgattcgagatctcccccgccaccagggagatgcgcgtcaaccttggcgggcagtgaggcgtgcttcccagacttgaggatctcggaaatgccggtgtggtgcgattggtggggaggagatgagataggagaggattcgacgtaagactgtgcgctgccgggagttccatcccactggttggatagggttttctggtgacgagcctgcaggccggtccggataggctgggacgggaagctgccagactcaggggtacccaatgtcaaggaacccagtgcgggtgtctttggggtcatggggctgcggccgtcagatgaggtacggtccatgccttgcaagctctggcgcttggtgccgaggtagttctggtcgaaagagctggcatggatgtggggattttgctggttcatgcgatactgctcatagttgaagctgttttggacgaacgggctggccatgggagcattatctggggtgttggagtacatatgcgacatctgactttggtgactcatcgcgataccaccagcagactggtcttgaagataattcacattgtcgcgctgatgaccgttttgaccgctgatctcgagatccaacaactcgtctgtatcgatgccggagtttccgaagttaaagctggatgacatgttctgttgcgagccgtaggagtagggcatgaagccattctgctgctgcatgttcaagtcggacggatcgatcgcatcgttggggaattggttacccatcgagtaaccggagtgtgacatgatgaaaggggtgtagtcgtcggattcgtgtttgatgaagagactcgcttcagccatagcctggtgaaacaatatgggggtttgaaaatggggcggagatcggcgaggggctaagggaggagtcgtggtgccgatcctactgactctccgcgacagttgtcaaaagttaggcgatccgagatgcccgataatgaagaatattggatgaggtggggatgtgagaatgtcacgatctgtgtgcatggaaaagatgttagtcaagactcgaccccgcccgtaggcgacttgaagatgtcgtggcctccgtgcgcaaggcaacaggcaacccaacaaaatgcaaaatagaaagtgaaaaaaggaatgtgaataattacccttgaaacaatgaggattggaagaatgaagtccggggagactgtgagacgtgccaataagccgggggaatttcctcggtcttaaacccgggatgggtgcagatctcgaccacaaaggtgtcttgaagaaatcgcaaggcacaaggtgtaaggtgtaaagtgatagtatcttggagaagttctatagaactttgtaagtgatgaaagagaaagaaataaagctgagtagtgcgcaaatgcgaggaatgaaagagaaccggggaccaggaagaagaaaagagatcaaaagaccagagacgagcagggaatgaaccaagctcaaatcaggtactcccagctgaactcggttgatcccagttgatcccagttggagtatttgatcccagttatcctttgcagatgtaaaaagtctggagaagaaacaagcggtgggaaggcggtgagatggcgatctggggaatttttttgtcgagaacgttggcctcggtatcatatagttcgtagttcatacttcacccgaagttgtatattggccacattggatttgagtatctcttgcgccttgaccccccgggtttgctcaggatttgatgcccacgctcggattgcaatcggaatacgagttgatgcaagcgcttacttcttaataacaaaagaaaaggacatgcttgggcttgggtttgaggctgatgaaatgtaggacctaccaagtgaagaagcgtatgcgaagtcggtgtatgtaagtatacttaggtagactgaggtataaacctgtgttgaggttagtgaaagatcaagagtatacatcccaagacatctcaataagcatgcaggtccagacatgtaagacatatcagcagagccccgttcacacgtgggcacctggcgacaagacatatatcacagatgcaggaacgaaggggatatgtgatatatgagaaggaacttgacacgtaccttgatctgtatgctaaactaggagttcacggggcataaagtcttcacaaatcagaagttcgagagcagaagtgcagtgacaactcagaggaaagctcttgctggtttcgcagacggacaccgaggggatggagactttatgaactcaagcggcgctctcctgcatctctcatttgatatattacagcatcggtcatgcagcccgtcgatcggtgggaatcgatgagattcacctacgccatcggacatggatttttatttttattttagaattaagttgactactaccatctggatcagaagggaaaaagggcgtgtgtgagtgtaaatggatgtgagtggatattgggtgaaggaggggtggcaacggtaaacccccgagcctcttttgtgtttttcttcttcgtactatacatagataataataataataataaagggaaatactaaaggaaaaaaacattatcatattcacaacccaaaataaaaaacatacttgggcaaaggggggaagggtgatacggccggatcaagtaaaacggctatcccatgatacacattggtatatttgtcacctgttactgcaatcatgactcacggatgtcttgaatagagcaagcaggaatgtatcagatgagattttggggttacaagcataccgaaacctatcttctcagaaacccttatctatcattcagagtgggagttttgcagcgtatattcaagattcccgaacgaggccatgtggatatggttgagctacattaacaatgcagagtactagcactcaagatgccggagatggtatagatcggctagcaaccgtaaatgactacgagtcgcaaatatcatccggagaacctaacatgcataatcccattaccttggcaataccagagatagacaagattggacaagatcctagtgtatatgcgaaagaaaagcataaaagaggaaagaggaaagagaaaaagaacaaagaataacacagaccacatccataagcactagtatcaactctgcaagagcatctgtgcggtctactcttcatgtgggatgtcgtgcagaggagtctggagtgacgatcatatccgcactgtgatcgtcaagggagcttggaccttcatcttcctccgctctgactacgcacttagccttgagtctcttctttggtttatttttgttctacgtaggaggcggacttgtggttgttgatctaggatacagcggcaaagggaataatgttatagttcaatatttggaactctacagaatgttcaaggcagtcagtaacttcggacttcggacttaactgtccggcctttatcggaagcaaaaagtagaatggtagaatacgcagaaagacaattggaggggttggaatgtgtctaagaccctccaccaatagtgaatcaaagcaatacacctcgctttggtatgactgtgctaagccacatcgccaaactttcccctctttgagagccactctagtttaggggatcatagtatgctgagatcgacggatggggactgatctccgagatttgagtggaaatggatctgacgtcccgtcccgtcaaggttcagctatacactagtaatccacggtcgacgcaagggagaggagttgtatccaacgatctactttggtggtattcaatacacgatgttgagactatctatctcttactcaaagtacccgtgcacaggaccctgacatgacgacatcgtacgtggttaaggtcgcactccattccggggtcacggataaactgcctcgtgtgcgtcgaggacatcctacagagtatgtctgaaaaagcaagagaaaacagggaaactgaaaaagccaaagcagaacccaaatttggagaaacaatgaggctagtgataatgttacccacggtgcagtccggatgcatattagtgcccttatggttatcggataattcccctacgtggtacacgggtagctacataaatacagtcaacagggaaaggttatataatgggtatgcaacatcatctgtctggagttcttccgatacgactagcggcaactatagccgttataccgttattgatagatgcttctgcagggctgtccaatacaacaactttgccgccactctactgttacagttacggccgatcgctacagggtgcgcaccagccatgaaggatcgacagtgggacggcaactaatgattagaagttgcagaaagagcgggggcactatcaataatggtcatgagtctagatcgggtatagtaaagaatagactattattatagtgcaaattaatattatagtaagtcagtcatatggcaatcacattcaaagcatgtcgatttgtttatgcaacaaaaacctctaggggagtacagactatagttctacatgtctttaggggatttaaccctacagtaggtatagcgcaaaggaaagaaatatggataattatacaatgttataataacctaaaaacgactaagaatagatagtaatctatattcaataatacacaaagtcgctgtagctgggttatatacttgctacatattggatcacgctataccccattgggaactagcctcctttccccgacttcattgcagaactgggaactgccactatacaactatacctctacacgccacataggcaacatttcaccctcttggtaagtgacatgtatttctttcattcccctggttataatcctatggggggataatcctggtcaataaccccacagggctcggtccgagagctttgtacccaaacactggaaaccatcatcatctgacagtttcagcacttaacgccgatcgggttggtcacatcggtagcttcacgccatctcgtcattttgcttggttcccctcgtctttataccctcctttctcgatagcgctgcgcttccttgtccaatcagcactccctacgctgtgttcgcttcccatcccttctcggattgtgcccgcaaggttcaagctttccacctatcttccgtttggttggcttatctcgccacatttttgaacggcgtaccctcgattgcgatacacttgcgccgcgccagaggaatcccaagctaccccggtagccatcgccagctccgcagagatagctgcagatcccgttgggctgacgccttatcactgtgcaatagacagacttttcttggtcgcggagattgtccataaagtttatctgccagcgtgctattcaaagcctttgatctttcgatcttgaccggcatatctccgagtcggagaactttcctggaaagtaggcccgttcgaacccagtcacggcgtgtcccagctcatcagaagccggatccacattcgacacagtcgtcatctgcttctctgttggcttgagcaagtccccacctctagccaatccttacggatcatccaccacccgcgcagatcatctgcactccatctcgcatagtccctgcagagtgttctcttgtcttgacttcctagactacgggccttttctgcagacgcagtagtgcacgtacctctactcgttttatttgggatctaaaactcgactaaaatctgacttaaattagtctcaaacatggcgaataactcgttccgagactctgtcaactcactgggatggtcgcgtagagacccggatctccccgtgcaaactggcgcgtcatcgaacaccccattcttatctcgtctacagtcttacaaccccttcggcgaagggggttatgttcaactgcccactcacaatgaaggtcctggggccccgttgccggcaccaactcgacgggaagaagaagagggattctttgcttgtaagtattttattgtctgtcttgtgatcccccgcttcccagatcttcccgtaccccgttgcataaggtccaggtgatgagactgcagttcctgcgccggcaggattcattaccaccatttgcaagtcgataaatgaagagagaaaatcactaacatggactgtgtatagtgagtcggtgggatcgcatgctcatctttggtgcatgtaatttgggcgcagccatctgtttcatgatctgcttcttcttgttccctgtcttgtcactcaagccccgcaaattcgcggtcttgtaagttgcctccgcgatggtccgcattaatgtgggctatgttttccggctttctatggcccttccagctttatttccttttttccccggctatctcatgctctcggacgaccgagcaaatcccgagctaggatagaccaggtcatcggtcaattttggttagggccatgtgcgcctttgtacttcacactggaagctgattggccttgattgacctatatctgcgcctcatgccaagaacattcgtctctggtcttggatatctcttgctaacaggtttctttattagatggtccgtcggctcagtcttgtttttgctatcatgggcggttctcatgggaccgtggacttacgctaagcatttggtctcggggacacggttgccattcacagcggcctattttggatcgatcgccctcacgctctacttcgctatcggggtaagtaaaatcgatttctttatctttcttttttcgttttcgttttcggatttggattttgtgtttgatctttacgctttacctcgttgtgcgccgacgatccttcctctcctcatgatactcccctctgcatttgcttgtttgtcgcacactcgctctccctctctctatcctagtccgtcttgtcgcactgcacaaccgggaaaaggggaattttgcaaccttcacacccatcgcgcagtacaacctgaatccacggcttgtcatgtctgttgttggccgcagctactttggatccttcgaatttatcacactctgcgctcggccgtcctctctactctaactcttgcgtctgtgccacgtcccaccacggtgcgggacttggatgtcctttcccttacttcaccttgtccaacacctaccggtgtcacagagcgcggagtccagagcatcgagatcaacctgtgtctcaccgtccctggctatcaagtcatcttgttctatccgcatatcacaactacacaccatccacttgccgcattcggcaaaacatcctcttctggaaactcatgctgacttcttcttttcggtgcattctagcgtcagaacctcttcctcactctgatcttctcgatctttcagctcgcggccctcgtctggtacctcgtcagctatttccccatgggcagtaccggcctgcagtacgtgggtcgtttcggagcatcgcgtgtcaccgcttgggtcagtggttaatttgttcacttgctcgtatctgatatcctgctctttgtcggctctcacatatatcgaacggtatactcgttgttgcttcgataacgggcgtggtttgggctatttgttgtgtatatgtagctagccagaactacagtgtttggcactttgatttcattttttccctccaaatacttacctttgcgtgtggacttcgtctcttggtagcacagcactgaatattaatatcagaaaatgggaccttgtaggttactagtgcatatatcggacttcaggctacgcttgatgggtttccctttccgctttagtgttcagctcttgccgctttttgacctctcaagtgaactgggggacgttcctaatcacactcaggcattacctagtatcagagataaactacctgagacctaatcttagaagcgaagtaaatatgaatagtaaaaatccatttgatatcaaagctagcttaacgaataagaatgaggacacgcaggcataagatctacaggtaatgcaagcagcaccgtaaaatgcaatccagcaaagtcatagtaatagtcatagtcagcacgaaagaaatcaagccccaggttcaacgaccactctgtttcatcttctcagtcattcacattgaaaagtccccttcaatacttcccccgactcatgaccaacccaacaacaccatcaacaaccttaacaccctcgacctccgcctcaaaaatccccgtctcaccaccagacccgacctcaacccaccgccgcagtaaatcattactctccttcggcttaacatctggcgccaccgtgccgaccgtgatatgcggaatagaattcgcacacggccattcagccgcaccggtctctgtctcaacgccctcggcaggcaggatgcgcgcgacaaaggccatgatgcggttgtcccagacgagacgctcgatgcgcacacgcgcggagcccagggctggcgggtactgggctggattttggacggggtttttggtctgggtgtcgatgtagcagtttgctagctggtcccagatctctgggttgtctttcttcgaggcgcggtggatgagggttacgtggaaggttggttggagacggcgggagtttacgagttgattgtagagacgggctgtttcgggggctgttgttggccggaagagggagtgcaggattgaggttatttcggtggttgggagggagatgttgaagtattcgatctttttggagagggcttctggtgagaagggggagtctgttggttcgggaaggagggggccgggttcttgactcttggtctttttctttggcttctgtggagcgccgtagctgtagctgagatcctttgtcacggtatagtcgtttagggaggcgtcgatggcttcgtccagctctgctgccgttggcatggttggaactaggcgggggtaggcggcgtgtagggctctgacgactgtttcgaggttctcgcgagaggaggcgcacacgtcgaggtcaatgacgtgatcgaagacctggtctggcaagcgggtggtgtcgacgccttcgaagcggccgaggaatccctccatgattccgacggtctcttctcgggcgttggtgccagcccggatggattggtgattgtcgccacgctctagcacacgctttcgagtgacttctcgaatggcgggaagcatgtctgccttgggctcgtgaacccaatgcagagcgacgaactgcgcatccggaagcacggggtagatatcgtccatgagctgcttccgctcgcgccgttgatggttgttgcgatcggcgattacaacactatgctctcctagagcatggctaatctcgaaagcgaacttctgtgccttgttcctctgtttgggaatgttgtcgttctgaacatgtccccatccgaagagcttaaccagagccaaggcgactgtcgtctttccacatcccagcgaggcaaccggtgcgaggatgacatgtttgttgacatccagagattcgttcagccttttagcctctagagcgataagctcggatccattcattcctcgttctttgaggaactcatcccgcaaagcgatgataccgtggttattcaggtaatcatttgccatgtcagggttcctcagcagagtccgtcgagcgaactgcaagtactcttcagtgaccttctcatgcttcttgatcttggggtgtttccccctgataacggatttggtgcattcacgccactggcggtacatcaagtacggctcttcgaacttatacttgaagaaccaattccggtagggttcagttccgttatcgctcagctggcatcggatgacgaagccctcagtctcacgtccatcccatgttcctgtctccgcgcatccttctaggaagttctgcaccctgaagatgtcatcaaatacctcgaacttggccttcttgaatccccagtcgtcagcaaacttatgcaccttgtcacaagacattgtctgaaaatcaggctggttgtagttgagaccgtggaggtaaatgcccgaagaagcctcatcgtaggccagcacatgctcctcaaaagtgtcgtcgcagagttctccaacggctgtgatattcatctcgcgcagagtccgggcaagctccttgacagatcgattcacggacgagacatggcgttccacccaacgttctcctgcctgcgcgtgggagactttcgtatcgtcgcgggctccagtcgagtgtttactgcagactagcaatgtgtcgtcttccaaagcagaaatgaaaataatgcatccattctcctttacactcagctcgtagggaccccttgtgtttttctcaatgttgcgccattctgtgttctttgtctcgcctacgttgaagaacttgtcgtatccgcgcgttgcgatttcgggggtgttgtccttccgtttggtggtgaaaagacctcgcgcatatgtcggcaggccggcctgcttgtagtcccagtcctggaacttccacgagtccacaataacattattggctagcacaaaggtgtgctttttgcaggtgaaccttagctggccctttctagctttgcgagcagtctccaggcttttcaccagctgtgagatgacgtgcggatcttgagtcgccatttcttgtgagttgggtatatcaaagtgtgagatctgcacggagaggaggggcagccaagagtgggggaagagaaaaggtgggatatttttaccgacctcccacccaagaattcaggagtatttagagaaaaacgcagaataaagcataaaagaaaggagtacagaaaagatcagacgaagagtcagaccgaatgtgtcagatcaggtgcggggagccgaaagggaaaggcgggatattttctttttcagctttgacttgcctgaacatcaccaactacttctgactcacctaatttacgagttttaatcaatacttctgactcatggctcaaaatccttacctattggcctgcgacaacccaaaggttcttctggacctgctgcggtccaatccttcgatcgcatcgagccaggatgagtccggctactcattgctgcacgccgcagcctcctacggccataccgatctcctacgcgctctagtgaaagaattcaatgtcaacgtcaacctgctcgacgaagatggcgagacatgtctatttgtggtcgagaacagtgacattgcgcgctgcttaatcgaggagctgggtgtggacgccaataagaagaacgccgaggacttgacagccgtggaaaagtttgagacagaaaatgagttcccgcaggtcgctgcctacctccgcgaagtcgtcggtggtgctcccgctccaacacacgcccaggccgcagaagttttgaattcgcccggacccatccctggcagcaatatgaaggtgaacattggtacaatgacggaagaagaggcaaatgctggtggtgagcctgatccagaattcaagaggcgcattgaggagcttgctgctcgtgaggattattacagcgaggaggtgcaaaatgaggtgcgcgagttggtcaaggatgccatggccggctccaatattgaagctatggaacgggaaattcggaggagaaccgagtaagcagaagcattgcgactgttccaacatctacatgaagccaccatcgcttttgaacatgcgaatcactggaagaaatccacccaagcaataccaccccgagtcccaaagtctctgctgattacatcgagcgcggacgggtactctgccgtgtcttcgggatcctttgtgtctcacttgaagttttgggtcgcgctgtgaagggtcgctgttagactcgctgttggcccttggggcttatccaagtggctcggaggccgaagagaagctccgatatgatcttgtaactaggattgaatcacgaaatatcacgatacatccattgaagcaattagcgcaagatacttacttgttaattggagatcatactagttattatgttgatgcaactgcgtagatcaccggtctagtccgccaagctcgagcccatcccgcatctccaacgtaacaactagcttcctacctacaacaacccccaacattatatcatggctcaaccaccgtctcctttccctccacaatcgcagttctactcatcccaaataatgaatcccgagacacctcctctaccacctccaaaacccaacagccacgaagccagtcgaggcggcaccccgcaaaatacctctgcacaagcctggcagccagacaaccagacaggcgcacaccaaggcgcatatcccaataatccccaacaactctatatccccgatcccccaacaatcgaggagggctggctcccagaactgctatcagacaagtcgtgggttccctcaaccttcaaacccctaaaaccaatgacaacacctctaacgcgcacaaacccagaacaaccgacctccagacaattatcaaagacccaagcctgatatccgccctctcaagccaacacgcctcctatacagcccgccaacaacacctcgagagcctaatccagaccaacaaagagctcgcaacccgcgtcttagaaatgcagaatcacctcgccgaagtccgcgcctccaccgagacgatgctgatcacacaccaatcgctagaggtctcctggcgtaagaagcaggccgagatggatgccgccctagccccgtggtcgccgaaggcgctataccagcgcttcagcgcggcgatcacggagcaggaagccgtctgccatgctgttgaagagagtttcctcgacgaagatcatcacggccgagccacagagaaggagattgcagattgggtccggcgcgtacggggcgaggcatccaagttggcggctcgcaaagaggccaaggcacggtgggatgagggtcgagttgggggttggcgatgaggtccaaacgcaacctcaagatacaaatatttactgtctgactgccatttacgatgccatgctgcctccgattcatgatctgtttattatgcactatacaatgcaatctacacggtgcttcaaggtcttgcttcatccgaatcacgcttaaaccaattccaggaatcaatcgtccactcacccctcacccctcatgcctaacagcctcactctcactactctccggcttgatacgtccctgtgcctgccccctaaacaccatatcccgcaccgcagccgcaccctcaacatccacatccaaaccccgctcatcggcccacccatcagtgcccagagaactcggaaagccaaccccccgcacaaaagcgcgtctccgactgcgcgcaccccaagcccagccgccaccgcgccgaatcggaagatggtacatgttaaacgcgatataagcgaagaaaaggccgatcgccgcgccgaagagaatatcaaagccattatgtctgtaattgaaccagcgcgacccagcaataaagcatgccgtggcagtcgggaagaacgcaatcagcattaggtagacgggcggcgcggcgccgcgtttccgcacggataaactatcatcgctgtagctctggtcttcaatcgggtagcgcgggagataaggaaatgcgacggagaatttcgagcagagccagagggttaggtaaattaagccggcgaaggagactggattgtgttagctaggattcgaatttatgtttgcgtactgtatgttgtcactgtaattacgcgtcggagcacaccgaagatgatatgcacgtaaacagttagagtaaatatggactcacaagaagaatgcccactcggaaaactcgcaaagccatcaatgcgcaacgaactactcctgtcgcgacaaatctcccacgaaacaagcgtcgccgcaccccgcaccgactccccaagcccgccaactgtgaactccgcaatgcgcgctacgtctggattgcagcgcgcgagaagatcaggtcgcggctttccgattaaggccttcagaccctgggtagcggtccaggtgcttgcgagggccagcgcgagccccatccagccgacgttccattcccagaatttgcggcggatatattgcgctgcgggggatttagaagagccggggttagaggtggaggtggaggaggtggccttcgctgggacgagtagccatgagaacaggaggattataatagccggggcgaagaggcagactaggagcagggttttggttgttacggtttctttggtgagggggtagctgattgttggatcggttaagctgaaggggtggtggtttggaggttgtttgtagaagccatagccgattagggcgatgccgctggtcgggggtcgttaattgggattttgatgggttcaatgggttggacgcacatgatgaatatccagtcgattatgtaggatagtactagaagcttggaaatagctgcgaggcgtgtcactgtctctttgacggagattggcatggtcgtgtgtgatacgtaattaggaaggaaatgttaaaaaaaataaaatgaagttcaagaaagaacgttggaaaaagtacatagacggggatgacgatgccagggatgattgtggcggagtaagaaggttaatttattttgaatttactcgaacacttcagatatacagtagcaacagttcgaagaggttgaaagaagattagatgactccatactattcatagatagtatccattgactccactttcctattgttcaggaaagtttatcactagatacaggttatagcaggagaatgtcgagaattgcagttttcatcaatttccaccaagcgaggtggttaacgcagtttgcttatatacaaactgcctaggaagtgccaagctcgcatgctacggatagcctcagtcggccatgaggacttacgatctgaccgaatagtagtttcttggtagtgattcatagagatagaaagacttctaaactacccatatgcatgtaagtagagcccccgagattaacaatttcaataatatcgagccaacgcctgcaattccaaagaaatagccaaagaaagatctagaatccagtaatcgtccggcggcccatgatggcatcgttcagctgtctgtgaacctgttgaaccccctcgaaccgaatgaatccacacgattcactttccaagtggttgaacagactagccagggagtggaactccttcggacagcctcgcttgaggcagtggtagaccttctcattgtggacgggtgagttgacatgcgaccccagcgcttttggcgagttgaacccctttttgcataggtaacacacccagcagctaccattccaggcattgtcggtgaccaggtatgtcatgtcctgttcatgttcaccgtgccacgcgatctgcttcttgcagacaataccattcggatcaagctgttgaataatgcggtggatgcggtcgcggttcaagccttgagcttgagggcaggcaccagactcaagatgatgggagacaccgctggcagtgacgaagccaacccgacagaatggacacgcaatgttggtgccgcgatggatcttggaattcaggtgctatgagataaagacgtgagtggaacgggttcaaagtttctctcggatcatatcagctcgcctacctggcgcaaacagttcgcgttcataaattgacggctgcattcttggcagtagttcttgtaatgtcctttggcgctcatatgattctccacggcctgctgcgtgtagaatttcatcgggcatgcctcacatggaactttcgggagccaatgactcttcgcgttcatatggttgttagcggcgtgttgagtgcggaaggtgctgttgcaagtttcacagtcgaaagtcggcgcccagtggtctacagcattcatatgctgattgcaagcgttctgggtgcggaacgatcgattgcatgtttcacattcgatccagtgacgttcgtcatccatatgctcatcacagtcatcctgatcccagaatactgcatcgcaggtgatgcattcgaacatgatggactgatgtaaaggtaaagaatgatattagaagaagaaggggagagagagaaggatatatagacacatccaagaccttatctcttatctgctgagcaaacgcggcctgtacaacacactccgtttgatcgccatctaaaagtacacaaagacaacttagaaattattagaaagatagttgcgatgcatattttaggtaagtgtatagatatgaagcagtataaaggttgcttagaagatgcggtatcaactacataatgttatgaaagccgtgagagctagaaactacccctcaacctcacacttccgggctttctgactcctccccaggatgactgtacttaggtcgcccactggcagtgcgatggggaaatcgaccgcttcgaggatctgcgcaatgaaaatatgccaaatcggaagacagagggcaaaggtgaacgcaccagccgcctattgataaatcagtacacatttaatatcgaagagaacaataccatatttgcaatataccttttgtaatttggccgccagcactaggttccccagcgccatctggaaatatattcctgaaaataatccaaatgtgatcacaagcagaaagagcgcgaggaagaggcagacgttcgtgcggagggcgcaaattgtgtatacgaaggtgatgagtgcgagagtgacgtagtagaaacctgtaatatattcggtcaggacgtgcacatgtacatgatggggtgtgaaaggtaagactcaccgacagttgcgctgtattcagcggtctccatgcctttcagtgtgttgccatcagacgagtacattgtgccaacggcaaagaatggcatgagcgatgttccctgaaccagccagaatgtacctatgagctccagttagcaaatgcatggatgcgtccctaatccatgacgaactacacataccatatgtgaagaataatgcgcaagaaaatgtattccctagaatccattcgccaattgctccgaatatttgtaccattgcaccgaagaagatatagactggtctgtgggagggagttgttagtactgttttccttgcagcatcagtatggcctctcttacaaaatggcaccaccgtttccacctgctcctctccatcccatggtaagcattgcggtcggcgtcgcagacagcaagaaacccatcaatgaaatcggcgtgggatttccaaatgtggaacgcagctttcctgcatttggcgtcttggggctaaggtatagcttttcaaaaacatcccgtggtataggaagcataacactgtcggtggtctgataccgacgaagcatttctgccgtagaggtctctggcttgtcgccgatagtatcgtcggacattttggattcaagggaaggatttttctttcttgaaaaccctagcaacggcggctcgatggtaatggtgctgatctaacaccggaagacagcgtggaaaagaaaatatatgaaccagaccacgactcgcagccccttttatgctctttcggctattcaattattcggctgtatatctaggaaccgagcctcgcagggtcttaccaatctgttaccatataattctatttttgcaacaattacattctgtatatcttacacaccttcttgtttggaacaaagtgcggtggtattccccacaatcctcaaccaaaccccggatttgctccgtcgactggtaaccagcaacttggtctcggcctatagcgcgcaattaaacatgcgcgatccaccttgcaggtgaagcaattgggtagtatgattcgttggctgaatcacactagatgcagaacgggttagagcaatctcgtatcctccctagttttcgaattggcgtggggcagacagtggggggtgtgcatgttgcgcggtagtcatgtccgctccagttccgcttccccttttcgtgttcccccgcaatggagttgaaagccgaggtattggatctgcgggtcggcttcctagtatctagttttgatctatcaataatggctgaggtataaaggcgcacgcgtttattatagactcgcccagacctgggccatacttctttagctggctagtggcgccaataaaaagtgtaatcagtaaagcttgcttcggtcaagtcatattggccgcctcggcagttgggctggcaaatacagccgcgctttggcgagatgatattccgaccttgtggatgtgtggagtttggggaaaacctggggccccaggccccagtggagcttcaggaggataatgcatgacgtcatcaacgagtgattatcatagtcgatccaaaaaccaaccttgcaagcttgggttcacagagatctgacaatctcttacgccgcgttaccaccgcgattgctatcatagcccggcccataaagtcaatataatgttttattccggacgtgcaataaggggatctcgacaggctaggctacaagcctcgatcgttatccacgaaagagaaattgttcaaaatgtaatcaataaacagagacaatccggacagctctactcactttcatatatacaatatcagtcacactatgcacgagttattatggcacaaaccgatttacaacgagtggcctagacacgtcaagcgatacagtgataacatacatagattatacatatcttctccaagtgtctgaacaggcagaatgattgaggaaaaattgtgcagaaaactaccaaatattggctggaggatgaagaaaaagagaggctctgcgggaagtggggccgcttcagaccgaggatcggatctcggaataatgctgttcctggtagggtggtgcatcgtcacctttgaccagagacaaaatttcccagccctagacatcattttagctaataagacaactgcagggcaggcacttgagaaccactgttttaagtaagctacttgggatgtagaacgaaatgcttcagccctagctcgggaatcctacttaattctcctgttttataactatccttttactcgaaagctactagaaatatagaagatatagggactttcgagtactccatgttgaatatctgctctaaaatatattagcgacaagctcgcccgtaaatgcacgaggtattaaaatttaccaacgacgcaaaaatcacttaatacgttgaagacccgagacttagcagatctcgcgatcttctacgaaaaatatacgcccggttaacgacaaactcccccgatttgaccttcccatgaaagatatccaacatggcttcagccacttcataaactgcatcctcgtcgggaagttctccaccaacacgaatcgatacacagtgagagtacctatgatgcatgggtaattcgtcgactgtaacttgcctgttcacgacgcgatacatcatacggcggaccaactctagatcgttaagccaggcctcttctgggtcaaagtacaccgtggcccacacaacatgttgtccagatggtccgtcggctacaggaacatcgtctatacgagtcctgaacgcggttcgtgttgacatattgggtatgaattatgggaatgagcttggggattggctgtagtgggagtttttcttcttcggtggaacagggagtgagatagatggggctgggtgagtattccctcttcgagtggtggtaatgcctgggcataggagatcaaggtgttcatatactcccaactgagacatgatgatatgcctgactatatagtgggttgcttgggctcttggtagaaacaaagaatcttttaacaaaacaaccgctttgtccagtcttcttattctgattgtcttattgtctactaattataagactcgaagtcattctttgtctaaactcatacccactatatcaacaaaagaactcaatccagatcaatgcaaccctctcctccaacctttagaaagcatccgaccttaaatgaaagaaccgaaaaagtctctcccgatcaatctgaacattcccctccgcacattccgcctgataaaaaagcgccaaatccaacgcatccctaagaaaggcatcaaaaaacaaatggcgaaactgtggaaatgcccaataattcccacgggtcggtaacgagagacaccccatgactctgtggtgcatgggctcgggggtaatcgagatactgacacggtgtgttttcttagcgattctcgcgtggatggcctcggcgacgagatccatgaactccgcgtctgttttgtcgcgattttctggggtcgcgacgaatacgtttacccatactatgggtccctcgatgtcgcatctctcgtcaatgtaagcgccgtcgcgggtgaacataccttgcataccttcttgtgccatattgaattctttgatatgagggccactccaaactatttggtatcggctttaaaacagacaaagccttcctggtgtactggtggttgaaataggaattttatgagatatgctcgtataattatattacttgggatattgtcagggctttgttggcattgaaagtctatgtttctttgatacaatgacttttttgacatcaattgaagataagctagaaatgatccccattgtgggttgttaagacaaagactttgaaattgctatttctgtttctacatagttctgtaatgtatgtcggtcaatatcatagcttcattctcatatactagcttctcatctaacgttatgtactccgaattctactatcatctatatacagtttcacaaaatcatagcctcacagcttaatccacctccccatccaagtttcaacaacctctttagcctcgtcaaccagaccaagatcaagcaacaactgggttgtgccacgcacagccgaatccaacgccgaaaagatccaagcatgtgtataactagtatgctccccaatgaaaatagtcttaaactccgtctggtagtaagcaggcaaataaagctcctgctgcccaacaagcggactagcccaagcgcccgcctgatgctgatcgacctcccagcactggcgattgtatacacccgtaaactgctcagcagcaatctcaccatggacctcaaccatcgtgcgctggaccagcgcaacgtgttcttcctcgctcagtgccgctgtcgaccgagcgggcgtgtccgagatatatgacgctaggatcacacccggtccggtcgcattcatgttataggagggatagcacacattcccgaccccggggatatcaactgacccacatccgccgaagatgggcttttccatgtgctcccagaaccgcgtcttgtagagcagtgacatcttgcatgcggggctgtagttcatagtcgagattgcccggctcaggagtgatgagtaccggggtagatcccacagtctgaccttgctgaatggtgcagtgaccacggcatagtcgtattcttttgtttccggtaccatctggaagggatcgtcgcgccatgcgactgcgactttaccggctgtctcgttatatatcagtccggcgactgtgcggttgagagtcgttttctctgcgacgtgtgggtagaatgcgcgagggagggactccagacccttgtcgatggtgcgccatttggtggctgcgaagtagacgtcgtcatacatatcgctccagattggagaggtgtctgagccatcgacatagtcggttatgttggtattgtagcccatcgcgtatttcaagtatccggcctcggaccagtggaacatgccgtcttcgacggcttgcttgtgggcttgatacatgttggttgcgatcttgcggattgtctcccggttgttcattgtggtatagttatcgtatgcggattctgcttctgcgacagctgttgcattggacgaggctgccttgtagactagcgatgagttggcagcgacttgggcggcactaggaattaagccgttggggagacggttgccgccagaggctgcgggcacattggggctattctgtatccaggggatgaagttgacctggagatctcgtttatgtttgttcatcttgttgagaacgccggcgagttggaagaccatgcggtgatcttggatttcgagtgtctcgttcgtatcagcataggtaatgctaactgggaaccgcatcggtcccatctcctgatattgatactggtctggagtcgtgttgttgaggtatttcgtacggatgcgaccaccgactcgcccagatgattcatagatgtgccagtcgtggataccaacagaatcgagcagcagactcgtcatcaagccggacattccaccacccagaatggcaacagaggtactcttcgctttggaaacaaatgcttcgccgtgcttctttgatttcatgtaggccaccccgtcaaaccacgggcccatggcatctgccacatcggcgatactctcgcgcttcttgacaggtgatgagaccatgatgggagaggagcggcccacaagcgtcgatccggagaaagcatgcagacaatgtgaatggggtgcgtcggatggtgtagtccagacgaatcgctccggctgcgcctcgcgtttcacaaacgtgcttccgatctcatggtgactctgcgtcgggtcttggatcccgcattccccgtagacaagctgcagatgaccttcgaagtctctgtccaggaactcgacgtggacgttatgcaaagagtcggaagttacacccccagggctgtggaaccgtattacctcgatgtctctccccgcgaccccggctaggcttaaacctgatagacctaaccccaagagggtatgttgtagacaaactttcatccttgatctgagcagtagaaacgtggaaacaaaatatgagcgcttggcaatagtctaattgcctccatgcttgccgtacacgttttatatatctttttttttgttcgactcaagtatcttcggaagattgatcccgtatgtcaagctatcattatctttgagggggtatttcactgcaaccttcttatctagcggtgatattgtagctggcgaaggtatgtagatacgatttctgcatccgcaatatattactatagcctctgcagcttgactagcgtccatatcatccatcgcaaactgttacgtaaaatgacagcattctaagggccagtatgaatttagttagcatctcagatctagccagctagagacccggaatttttcgagagcacaggtcccactttgtcgagtgcagctgtcagtggctgtcagtttctcttatcaagacggttgtttccgactgctatgttatcttagagcggggtgttggagctgtctggggatcgatatgttgtattctatgttaagcgcggggaaggatatttcttgtagtcaagatatgggtttgatttggatcgacaatctcgatattcttatcagttggattcgtaacagtccaggaaggtacaaccgtgggtacataagtacgtaggataagaagtcagagccaatacgcttgagtctgtgaagcggctcggcaagagggctactctccaattggtccattcatcagacgatccgggaattttgatatgttcccagtgttccagttgatccaccacacgtgatgatctgcgggggcatttggctacataggtttatattaaattcctcacaggggaggttatagcgaagagtagagataagtaaataaagaagtatattaagccaagcggaatacttccatgttcggtacttccaaggctaccggtatgtagccggaaggcgccggacccactcggccattgcgggggaggatgatgtcatgctgatgcctgaatatgcctgactatgtacattgacccttgacacacaaagaatttccattgaaataccctgataaacgcatctaaatcatctaaaatgaaattctagataggagactttctagcccaatacagacaacctcggcacagtcatcgcaaaagcactcgaccagaagacctcgaatctcatccaagccagccttaacaccaaagcatcaaactggaatctgaagtccaggaagtaagatcggggtaatccgcgcaagagggcacgatgtggagcctccggtgccatctccgggccaagttcctctatatcacctagtaaggaaccaagaagatcgagttggtcgcagacttcaaaacatttgtcctaattctccgggctgaagccaacatgttgtagagtgtgtatgatgctctttaaaatggttgtgaaggtttcatgtgcctagttgaagcgctgttcaaggtcttggggatcttcggatgaattgatctttgggaggagaagagaggtgttacccccaaggtccttgctatgtggtatgggtaaattttgtagcgacaagtcaagaatgtagatatcaatggatcagtagggaattgttccaataacgacagctcttaattgtaggtggtactgagactatttaagcccatccagccagctttctcacattaagaaagacaatgattgaaaacatggaaatcaacagaactcagatgataggatctctctttcctgcctctatcctttggtcaaagccttgggtagaggtgtaaaggaagaaatacattgtttttgctagtaatttttaaataccacagacaaagggagaaaattgaaagagattttacatggaaacgattgaggtatcatgcatccatggatgcatggatggtatattgggttatgagcaaatcaacgctaaaagagcacaaattggatatcaaaagttcatcaatcatcaatcacaacatatcgttgtctcctccaatttccgtatctcttcctgcacgtcatctattcccactgtgacaaccatccaatcacataagaacttgcccagtcccgcaccaatgaagatgcaaataatcacatagacattgaagtacatggccaacaacatggtgatataagcccccgcaaacgtgactgcatgaatcacagccctcgtcaattgttgtaacggcgtcgcgcgaaatgtcacggcggttctggcagattcaaatctcctgacaaacgtgccgtgtagggcttggcgctcaaattggcgggtcaggaagttgtcatattcccgaccaatgcgccgacagaactcgactaacacgaccagcagaattgtgccaatacaggttgcggcaaacatgccattgttcttgatctgccatcctgcggacaggaaacaggcatcgatggtgtcgaaattgaacatcatctggctttggtcagcgaatccacttgaaaggtgccaaggtccaaatatcttggcactcaccgaaaccttgcagctgctcgagctggtgctggaatccatgccctccatcttggccggtcttctgggtatgcgaggatgagaagttgaaaatatggcgcgtccgatatcagctcgatgccgctgttcttataacctggtggcttctccccacctacgctgaggcaaagtggagaaacccagcgatggcgtgggagaaatgtgctcaaatcgccgcaaatgcgaaaatggccgcgttgaacttggaagttgggattcgcgtaatggcaatgaataaaacctcgtgggtttctcgcacagaatctcataatctctttcgcgcttcgccatgaccagataatcccgaccggacgcagaattaggtgttcttttatcaactcgaactcgagctgaattgtcgctctacactcattggaactgggctgaggctcataatcggtcttcaacatcggcctactgcatagggcagctcaagacataatgtcgtttccaaaattggatgctcgccacatccagaacatgagcgcggcgacatcattagagcctcattggggatactacgatcgcgcccttccctgcaccaacgatgcgggatcgtgcgcgtacctcgacgatgtatacgcatcacatgaccggggaatgctatattcaggcattatgtggtgtgtcattggcacaattttgctcctctgggtcgtcctgaaccagttcaatacgccaacgatatcaccagcactagcagcaccagaactagccggactatacaaggtccgccgctctgttgcctcattagccaggaaatatctcctgcctgatgcggctcggctcatcttcggccgcacaacacgcctccaagtgctcaccctcgctctgttagctggctacctcctcatattcagctttgtcggtattctctacaacacatgggtcacgcccgtctcgaagatgcccggtgtatataatacccgcaacagcatcggcccgtggtcagaccgcgtcggcacactggcctacgccctcaccccgctctccgtgctgctaagcagccgagagtctttcctctccctcatcaccggcctgccataccagagcttcaactttctccatcgctggctgggctatattatcttcctgcaaagctccctgcacacaatcggctggtgcgtcgtcgagctgagattgtaccagccgcaacccaccgtcggaattgaatggatcacccaaacatacatgatctggggtgtcgtcgccatgatcttgatgttcttactcgtcgtgctgagcacaccgtggggaatcagactcaccggctacgagaccttccgcaaactgcactacatcctcgctatggtctacattggcgcctgctgggcccactggaagcagctcaagtgcttcatgtggccctcgctgatcttctggttcctcgatcgcggtgctcgactcgttcgcacaggcctgctacactaccaccccaaccactcgggtagtctcgggctcggcttcaagcccgccgatgcgaccatcacccgcttcccggacaccgaacacggagatgtcatccgcctcgacctgcacaataaccaggacccctggtccatcggcgaacactactacctaacctttgcgaagtgtagtatctggcaatcccaccccttcacaccactcaacctccccgtcgtgtcgaagggtacagtccaacactcatacatactccgagcgaaaagcggagaaacgaaaaaggttgccgacctcgcggccaccggcacacctacaacacctgtcatcttgaccggcgcatacggcgagtctatcaccagtcacttgacaccaagcaccaatataatttgcgtggccggcgggaccggcatcacctatgtcctccccgttctgctagatcttgcccgccaaaaaccctcaccggaccgcaaggtcgagctcatctgggcagtccgccacacggcgaatacagagtggatcgcagcagagctggatctcttgcagaaagcgcggaatatgttgaacctcgagattcgcatttttgctacccgagactcgaggagcaagactccctcgatcgagaactcggattccgaaaactgtaatctctcggtcccgaatattgaggagaaggccgtgcaggtctcgccttccaagtctgtttctgcgtgctgtggatgtgataaacctactgctgtggagcggctcgggggtgcctcggatgatgtcaatagacatccggatcttccacggctggtcgatgatttcttggttgatacggtgcgcggcccgacgagtgtcttcgctagtggacctggtggtatgattagtgacctgcgggatattgttgcgtcctgtaactccggtgagaaggtctggaggggccaggagagatttgatgttagtcttatctgtgatgatcggttggagtggtgaataggatgcgaggagaggggagttgtatatattgcccaggtggctgtattcgccaaatatggaatcatcataagttgtggattcaatgtacatatcatcatgacgaattttatggatcatctatcaacagaaatatgggagtgtagaacaagtacaagggtacaagggtcacaggttttgttaatatctcttcgtggctgtccgagtctacgaggaatatgcgtccactacctagatgtaacgaatatgaggtggagtgagtaagaggatcgaggatcttctcttcctatgcctcgatgatagagtcatatggcttagatgcagagatagaccgcgcaataatagagatatgttaaagtcataaaaaaaggaaagacctatgcctacggttttgatcataaattggaacctaggggacatatccttccaaaaatggaaggtggatccatgtcacgtatggatgcctaaacatgccttgatcctaacaatggtactatggcaactatcaaaaatatctctactttgtctgcccgttgacaatagcatcccgcttaagttcaccaccaggcaaaagcatcccagatcgatcaatgaacgaccgcgcccgaatataagggtccaatttccaatagttcacgcagaactcatcaataacagcattccgtcgcgacttgagctcctccgctttcgacaccttgtccttcccgtcagactgtgagctggcagagacccatgctgctgtcgcagagatcatccggattccaatcatcatacggtcgtacattagtgagtcgcgcgttgcggtgtctttcatgactgcattctcgtctttcacgggctcgtcgtatttataggtccatttttcgtcaccggagaactctttggggatcttgctgcgcggaataaacttgtccaggtcggcaattgaccgcgtgaaatgcacttttgatgcgacgacggggtccatccagccgtgaatcagtttccagatgcctaaggtgatagctattgtgagtattcattgtaatgagaaaggaggatttcttaatggaatcattcgacttaccggagaaaatccagggtgcattatggatgatcagttgccccagagactcggggtagtttgcttcgaagcatctgagaatgaacttgactggtgggtattcctattgcgaatattaacacaaggcagtcatctcatctagcctcagtacggtatcataccatgttagataacccgaatcctgtcaaatcgaagacaattgtctgtgaatgtgtcagctgagtcaatatctcacttttggtcgaacatacgcccgtttcaaccggaggagccaagataagtcgcgtcgcctcaataacatgaacaatatatcgctcaagagcttcctcactctgagcacctggcttgtgaatcttcactctagcatagataacaggtcgaccgtccctgtccaagccatgaaggaagctttttcccatcttgagttggttgataaagtcggcaccttccttcttctcctttgacgtagttttggcactacgggattgctccagagcatattcctctccccggggcagaatttcttcatcaacctccatctcctttctccatagaatgttcgacgccatcatcgaaaatgcctttccgacatcccatttcctggcgcgcaagaaccggagcaacaaactatccgggttttcttgcttgatcattttcaatatcgcgaaacacatttctcgaggcgtcatcttagagaggatatgctccatagacttgatctctgcatcttgcacgcccagctgtcggagttgcgagaaaaggaaagaaaagtgcgccggagtgacctttcggttggccatttccgaaatgatggtgtctttggcattttcattcatgagcgagtccaccttgtccagtgatttctgccctttattgtcggagtaatttccagttgtgagttctccatttgtttcgctattcgatcccgctagtgcgatttcatatgaggtctcttcattggtatcttcgtccttcaatgcgctaataatagcttccaccgttggctcattgatcttatccagagcagcaaacagcttgctggaggagtccttcggaatcggtatgtcatatacagccgacagaacagttgcaatagaggtcagaatgatgatccaaaattcaattacccttgcttcctggtcaggagtgaggtggccgaggtgcccggacataaggtcaggagtaggagacatggcgtgaattgtgggtagagggtgaagtgtaatgccgactgggggaaatcagttcgtattttgctcgcaagcccgccgacggggtcttgttcaatcattcattgttaacggggccacatgaatagcagggatgcctcggcgaccttcggattcacgggcgaattcaaaattgatacctcggtgtttgaacccagtcgatcgtttattgagaaataggtgctaggacctttaccttctcgtgggggatcttgaaacagctccgatggaacggacgccctgtgagggagcctggcgatgacgatcctccatattgggggaagatcgtcgcctctagggagttcgatccctctcgattttgacctcgaatacgtaggtgcgcggatatttggggacgatgattctagtttcaccacatttacatatgaatttaatctaaaccagctacgtattcggtaagtgagctgcgtatgtaagccaagatatatgttcctggagttcagctaaagagaccttggaaagattcgtgttctaggacaagaacatatttaagagataatcatgagcagcgtcgaaaccagccttgtccgaatacttagcggcatgagtacaaaaccttcaatgacgatatcgagatcttcctgcgtcgccgaaggatctccccccccccccccccccccccccccccccgccgccccccccactctcggtcgtatcatcaacgtcactggtgaccccattgacgagcgtggtcccgtcaaggccaccaagttcgctcccatccacgccgatgctcccgcgcctgcgtgtcccgcagtccgttcccgattcctccgtttcaatccagtaatcacgcccggcattaaatcttcgtagtaagcccccacccaatgggcggcctactcaaaatcgctcgcttgggcaccttaccctcttgatagcgaataaccttacccagtaagtgaagtgcccgatctctgtcatctcgctgcgattgatacttaaactgcagagaagtgattgggctaacagcttctctagtgctaactagtgtcctcctcataccggctctaacggtggttcccagctgagtgctcggtatcagtaccctgtgcagtcagccccgatcccttccagcggaggtccgacatcccatagagatggcggatccgtccaaatggtaaaagacgttttattgagtgatgacgatcatcttcttctttgaagcctgatcttcaggtgcgtactcgataatgactaggttgattaccacgtgacctgtcgctccgtaaatgttttgctcctcgatggttttactcccctctacatatccctagggttttgtaaagcctctttttccgatagttctatttgcctttgtaacatatttttgatcatcttgcaaaatgccaaagaaacagccacgtgcaaacatattttgccattctgagttcgatttactttccgttttatcccttgcaaaaagtatacgtgggaaaccttgcttttgcgatgaatctcaacatccgaaaagtggcagtttgaattgggctatatctatatattttgaagatggtattgaatgaatattccgttctcctcgcaaagactattgtatgcttcaggaggagagtacaagcacattccttgcaagcgaggcggcaacgctaagttatttacgcgacaaaagtgatattcccgtcccagaagtgttttcgttctggtaatacctgcctacttgagatttgctgattgaattgtgtattcggcttacaattgaacagtccgacgcatcagaatgatattggcgttccctatatcttgatgagcaaagcacatgcgaaaccgcttgcttcttccggctgggataacaatgttgatttggatgaaggcgcttgaccacgtttgacgctacagcagaagcgaaaggtcataagaaaattgggcaaaatccacgcatccctttcgaacatacgatttgatcgaatcggatcacttttgcgggtagaagacgattatactctaggaaagtgtctttctccagcccttatgtggcatggccgcgatgggtttgatgaagaccatatcccactcaggccgtttgacgacgcagcatcattctacagagcgcagaccttcgctttgcttactcatgtcagagaacttcctatgtagcaccatatgttccatgcaccggtacctacacaacaggaatacgatacgttcagtgaatatcatattgctactgataggtggaatgactacgttaccgtgggggcaaaaatcgagagcgcaaaaaataggctcggctatacctcggctgcgcttgctattttggaacttgttcccttgctagcagaaagagacgatcaaattctgagctctggcttcccattgtttcatcccgacctaagtaccagcaatttgttcgtcgatgacgatatgaatgtgacttgtctaattgattgggcttgcacttcatctgttccaaagccaatgttactcgtttgtcctggactacctcattcccggaatccaacacccctcgagtttgtagactctttcacacaaggttttgttgaagggaaaggtttcgatgcccaaacagctcttcttttcgagaaaagcaaggatctttgggaatttgctcgcttagttaatatggattctattcaagattttaatcacctctcggagcttttccaatcccttgcccctggacaggagctttttgcaaagctgaatgacatgaaggaacgggatgagtttatcacctcgttgaaaatgatatcccaatacacggccacacctgaggaaatgcggaatgagaaacagtattttgaatgtaacagacccaagagattggcgctggcacgccatatctcaacaacggcaagtcttgatcctaagtttgtggcggatcagcgtctctggaagtgggacgtgatatacttgaagcagcgagacacatgtttcctggccttgagaaagaagttaattgaaaggtgtggaactacgcaaataccgtctcttactaggtgtgacgcttaaaattgtgttgtcgcgagaaggataccatagctcgcgacgtcttgtttgataatgtcttgatttctttctccgcattcctaacttcacgaatataatgtacaatcgaaaaccaagcggccaaggcctatgatatgagaacaccagcaagggctcctaaaagaacaactggcactataaaagagcagcagagtccgaggagaggtgtttcagaactaagttcctcctcgatttccgctcgtgggtatgatatttccttctccgtggtgagcaatctagagtctctggggtgataggccggagagttgaaaagatgagcaatgggtacccaattgtggacaattgtcaagaagcacaagtgcagcaatggtggccatgcaaatgtagtgagcagtttaggaatttctgttccatctccggtcacagccacccagatcgcaaagagcatagctccaacagtcgcaataaaaagacaaatgttcaacaaagcaccgctttgaagagtatctctgtatgccttttggaacgacgaaatggatgtagcattttcgctcgaattggcggtgcttccggtgacaaaagatccctttggcttgcttccgaataggtggaatcgagcaatggcgtacagatgggctattaacacaacatgttaggatcaagtttcaggttccattagatatgtggaaagttttaactcagacttaccagtagaaagccaactgttctctgcgtgtgcaaaaggcgcaaatggaacacccgcgtgtgcactccgagcccagtcatatgcccatgtggacgcaacatgcacgatggctaaaacaagctgaatcttcacctccaacgccgacccagcaggaataaacccaccatcggagaccagaaggaaaggcagagcaacaaatccgatcgagtaggtcacaagacctgccatgatagacagtcccccaagagcaatatcccaacgcagatgctctggaatcgccttgttgacagaagggagcaacacagaaatctgctgagagtgtccgatgtgccaccgattccgctgtttgagatgtcccgcgagagaagtaggaacgaggccgaattgcaaaacctcttgtacctgcatcgtgcgctttcccagccctcgtaaaatcaacgatagctgccaatcttccgagaaagaataggtcggatatccacctgcgtcgagaatcgcgtcgcgacggaagactgcacctgaacctgcgtctagcgcatgaccgagaagatcgagttctgtattctcacacgtgtagaagtaagcccgcgactgggagaggggatcgccacagggcagattatagaaatactgtcgcgtggtcagtaatgctgcctttgggtcttcaagtagatggggcagtgtcgcgcgcagaaactccggcatcaggatggagtctgcatcgacgactgtgcagaactctggcgggtcttcggtttgcagggagaatagggcgtagttaagatttcctgctttggcgaaggattgcccggattgcttgccgcgggtgtgataggataggtgagtccattttgtggcgagttttgcaattgcgtcgtgcaagtcagttgacgctccatcatccagaaggcggactcgaaaccgggaagctgggtagtctaaaccacatgctgctcggaccgtgtccaggatgatttcgactggctctccgcagcatgttactagcacatcgactctgggcaggttttcgttgctgcgtagtctcttgcggagtgtctgatgtggtggctttgtcgttgcggctagcgataagcgttggtggtttagggaaatatctaagaagatcagcggatgctcatcgttctttcttggaaggtaacgtacgagcaaatagaccctcaactccgagcattaaccatctttgccatgtttgctctgggctcatcacggtgaaaaatagccgcactgtaaagtagatgtaggtggtccatattgctgcttgcgctatacggcggagatatttccgatacttctgcgcatacagagcgcgatcatcaggggaaagctcctcgatttcatagacgttgttaggaaacattgaagcgaacttgaagccgtcggtttgtgccgttgtgattctgttgcatattatacagatgattttctttttgcgctttttgactggggatatcaagaataccacgaaacaatttgtcttggaattttcacaaattgaccctaggcttttgaaggaaagccttctccgccgaaattaaggggtttgaatgcattcagggctccccatttgcttctggaacatactgtgtctatttatactactccgtatccacctggagactatcgctgccgagaaccaatcagtgcaccccatggtatggattttgatggcgctagccttaattggccgtaaactgcaagtgggccatttcctcagcatccgattggatccctattctataaaattctgagatagccggggactcgctatgaatatactgtctgaggtaccaacagtgatctgattcggtcggtcttgtcaatagaaaaagacgaatatagaatcccaaactgtcacaagtgataaaagtacggctgatcaagggcagatgacccgggtagcacgtagccggtagcctggcggtatctctttgtgatgatggcatcctccttggttgccacaccgtatcgttcaacattccgatacggtgcgatcaaatatcccccgcggagagctggaacccgaggtgacgactcgacacaagcaaaatgttgcgaactgaaggtctcatcacctcggtatcccagtcgcacttgacttggccgaagagagcattcatctaacgaacatatttgcgatcaaggtcttatccccgaatgtaatcattgattcttcacgagactcttcagagaactggttctcacaggtatttgcaaatttaatatgaccaaggctcaaccgatcgaccatccgtcttatcaatgcgggcagctccaaatggcccagcgcagttcgagccattgcatgtgcctcttgtgatttattaagaatatatgttgcctgagggtatcataaattagcacatgcttaagcaggcaaccttcggtgaacatatagttgtagactgagcattaattcaacatcaacatcggtagatacaagtgtttactctactaccaaataagaaaaaggaaaaagcaggaacttattagtatcgagagagatgtatatgaaactataaaaaaagaaacaccgtaacaacgaaacaacgaaagggctgataactcccatgccagtaccctatgcctaggccacgccagcgcatataggttggaatgtgtatgtttatatttcgcggactgagcagatcgaacgccggcagccggggttacctgcatgttgaatccgtgtgagcccactcagccactgcggggactcccggttaggaggaaggtattgctgtgaaatatatcggaacatatgcttccgaaaagggaaggtgggccctcacgggttgatgcctgaatataatgtttctgcctgcagatcacacacacacttattagtattagaatgtacatatgtcctgccacaggaagaaagataaaagcaggagttaatgggtgaaaaacaaaaaaaaggatgaaaggggtgatactcccatgccagtaccgccacgcccaacccaacggcttaggaacgcatatgtagaatatttataatcgtgggctgaacgccgacagctggggttacctgcatgcttaatacgtatgaagccactcagccactggggggcggaatttcgaagaacaggtgttggtcctaaatttataggaacctggagggcatgtccttcctaaattggaaggtgggtccatacacctcatatctttcgttcttgatgttcctgcatttgtgacctggttctcgccgatcgaaagaaggggacaggcgttattgaagaagaagatgtataagaaggccgcggggctgcttcatggatctatagagagaatccaaagatttcccgagaccttgaaaccttctgtcgtcgtagtccaatagagttctgtattttacaaaaagaagagcgttcttttggtctgttcacccacatacataatatatagaatggtggcagaccaccaagatacggatggtgaaccggcatgcattttgggaggcttctcctgttaggccttatcataattaaattcatgaatattttaacaatcatttggcattatcggggtatcatacttcctttccaattcagatcaaaagtagtatcaaaatccatagattagacatgtgatcggctcgatcggaaccccgcccgatacagacggaacggaatcaatgcgagtcgcgattcatagatagataaagaaagccctgggattcgcacagaaagatgaaaaggaataatttaccatttgaatagcacataatatcacatttgtccatcatttgccattcctgaccaagaatcgttggtcattttcgaaatgacctcaaacaacccctcataccttattattggcgcaggtgtctttggggtatcaaccgcctatcacctcatccagaagtatcccaatgcgtcggtgactttggttgatcgagacgcatatgatgccgagtcgcgtgtggctgcctcatgggattggaacaaggttattcgcgccgattacgacgacaaggtctactgtagacttgctcttgaggctcaagaaatcttcaaaaatgaccctctttggcagccatacttccatcaaactggcgtttactgggcgtgccgcagcgactacgcgcaaactgtcatcacaaaccataaggaactcggtcgcaatgacgatatcattgctctccctgtttctgaagctagaaagctttatggaggaatctttgacaatgctgattacaccggtgttaaagaggttctggtgaacagagctagtggctgggctgctgccggcgatgctcttcgagcagtgacaaagaggtgcttagaattgggcgtctcgtacgtcaccgcatccgttactagccttgaattcgatgggcatggctcctgcactggtgtgaagacacaatctggagagacattgtcggccacgcatgttatcgtcgctgctggggctttcacgccgactttgctagagtggagtgctgtgaagagcggcaacgctggactacgagctggagagcgaattcttgcggctggtattacgaccggaatggcacaactgaacgaggaacaatacgaaaagtacaaagacatgcctgttggcttccagggctacacaccgaatgaaggtacgctttccgatatattcgtacgaatgccactaatcattcccaggaaaacccttcattggcagcattccccctaccaaagaccgagagctcaagtggtggggatctaagattttcacaaacactcgagaggtagtccctgggcattacctctcttctcctccacccacgaatgactacaaccagtggaaggttccaggacctctcaagcaggatatcgtagaggccaggaatctgtggtatgggcccgaaagtgcaacatggcagatgacaaagcaccggatttgctggttagtgcccctgacaacacattgattgattttctaacactcgaaagggacgctttcaccacttcctcggactttatcatttcgcctcactctgcctctaaaggactatacgtcgccacttgtggttcattccatggatacaagtttttccccgtacttggcaagtatatcacacagatgcttgagggagaattggcgcccgaattgatagaaaagtgggcatgggatcggcagcggcctgactcgtccgacaacgtggagtacccaaactctgagatgaaacatttactgggacctacagcgaagctatagaggaaattggataggcattgaccagcgcgcttgctggggatcaccaaaactccattatgatacgcttgataagacatgatatgattttcattgacgttctgaataactacttaatatcataacgactgtttgacattaggtttacagctgatctagaagattcctcttgcataatatccgttaatggcaattaagagattagtacatggagcttattgtatattgagtcttacaaactcggctgctggggtaaagtttacatcctcgctaccccttgctgcggaacagcccgccaccgtttcgggccaacacatccgagagggaaaatctgccccgagcgctgaaagagtcgcttgcacaggagcttcaagccaaaatacttacccatggcaacctaaatcaatccaaaatcgtgattcagggcgggaaaatcccagggatcattgactggggtgctgcgggttctagtactttgccctgcgatggccagccctcgatccagagtggcgcgaactctcttcatatatcctaccgccaggtgaatatgaatattcgaaaaatatcgactgctgcgtgtatggcaacactccatatttccacctagcgtgagaggaaataagcttaaacttcagagtttgatccacggagttccattgggccctgtcggagacattacctaatcatttgtatgggccgatggatcccgaggtcgggttatcggcacccaattcaaccgggtggatgccattcggcgacttttgatatcattttacagggccatgtcgctgaatatcctgatgaatggatctatgtgtcaaagtgggattgtttctagggtggagcgttaaatttcttggatatttcgcaacttgtttgcctccagaatcagatgataaggcacatcaaaagtttccgatgataaatcaatcctcaacttccccactgtagatcagtacataaatcaagccacccccccccctgcagaatggaattgttcacacatataataaatatattcaataattcatacctagcatcatcaaaatgacctggcctgatgtctccgttaagcccgccgagggcatctcatacttcacccctgcccagagtcccccggcaggcacagctcgcaaccctcaaacgagcggaaagcccattcccaagctgttcgagcctatcaccatcagaggagtgactttccacaatcgccttggtgtatgcaattcccccaattccttccataatcgcacagctaacaataaccctccagttggcgcccatgtgccaatacagtgccgaggatggccacatgaccccctggcacatggcccactacggcggcattgcccagcgcggaccaggaaacctggtcatcgaagccaccagtgttgtccccgaaggccgcatcacccccggctgcctaggcctctggaaggactcgcagatcgcgccgttcaagcaggtcgttgagtttgcacacagccaaggccagaaaatcggtgtccagctcgcacacgccggccgtaaggcctcgactgtggccccttggcttggcggcgttatcgcgaacaactctgtcggcggttggaccgataacctcaaggctcccagcgccatccccttcaatgagggcgatcccatccccattgccatgacccaggacgatatcgccgaggtcaagactgcctgggttgctgctgtcaagcgtgctcttgctgctggttgtgatttcatcgagatccacaacgctcatggttacctcctctcctcgttcctcagcgcctcctccaaccaccgcaccgataactacggtggcagcttcgagaaccgcattcgtctctccttggagatcgcacagttgacccgtgacactgtcggtgaggacgtgcccgtcttcctgcgtatctcggctaccgactggcttgagaacagcatgccggatgagaagggctggaagcttgaggacacggttgagtttgctcgtgcacttgctgcgcagggcgctgtcgatctgatcgatatcagtactggtggtattcactctgctcagaaggttgcctctggtcctgctttccaggtccctcacgctatagctgtcaagaaggctgttggggataagatgcttgtttctgctgttggtatgatcaacaacggaaaattggcagagaagattttgaacgaggatgacattgacgtcatttttgttggtcgtgccttccagcgggataccggtctcacttggcagtttgctaaggacttggatgttgagattgccatggctggacagattcgctggggtttcactagcttccgcaatgcgtccgagtatattcagcctaactctatgaaggcttgtatttttgattagatatagatacaccggctgttgactttaccggcttgtggccggcttgcattgcattcactatagatatgccatttttttttaacaacaagaacaatgagaattgatatgtttcttcatgagacctgtgattgattagaagtatgagaaatttacttcagaaacgtcacgcatattggcttcgtctctctcaattttcttggtggtccttttcgttgccgcctgttcgttgtcttacgtattcaactacaacaaagattgttccaactaaaactaaacatggaaggctaccaagaagaagcgaggatatgtgaaacgttttgattgaattctaactagtctaagagcaattgtgtttggttatctttcattgggaacatgtggcaaagagcgatctgtttcgatgggacctgatgacatctggagctccagcgctatgaccccttcagcgtacatcgaaaaccagttatatggttctcaacggacgctgaagaggccataaaactgcagatccggacaatcgcctaggtattcaccaagggaagatgagaagtgatcccctattcagagcagccatggtctcaacaaaaagaaaatccccctgggagaacccaggggatatagaataaaaaaacgctacgtcactgcttcactgaacactcgcccgaaggtcgcgacccctcgagggaggtccagttcagcaggtcggccacgtacccgccaggctttcaacaaacggttgcgacccgtgatgcatcagccgtgctagaaggatttcttgcccgcttcctgaagcgctggactcggagccaagtccagacaggttcagagttccacataaagtgacctgcaggcgtaccttgactcgcgccgtgctcgcttgggcatcggaaacacatgatgtttcgcaagcggttccataaaggggccgttgcggctgctcctctggtgtctcgcgttgctactccaacgaagcgaaagaaatgttgatttttgcttcaacttaggtttgttcggcacaaagaacaccctcaacagatgtcagcaggattgaaccaatataggtactgatcctccccatgccttccatcatacagtcccgctggaaatcccgctgtcctcccaaaggggcctgcaggtttggccagttaaagactgcaggagttgtagcgatggcctcccataaatcccgtcgcatcgactctgatcaacgatttcattggattggaacgcaggttttacccctgatccgcaccataatctcaaaacgatactcgggtcgtaagagttgacgctttatgtactagacaaatctgagcacagtaaagcccggtggatcgatcttgagaaacagcttcgaattccctccccaatcacgccgcatgcagagcgagcgccatggcttcccgaaggcgtgctgccgggacgtcgcaagaagggccaattagggagttgttcgaggcatgtgactcgaagaaagaaaccccccctcatggggccaccagatccacaagaggtgcctatagtcccaaccaatgatacagcgccccgaatatctcacgctaagttcgagagtttcgagtgagtcttgaatggaacctttcgacaatgggacaccaatagcactgatcagaagaccagtgatcccatcataagacgtccaccggcaggtattccaacgagtctcggtcgggcaggacaaccgagatcaaggaggtacccttcgacgaacgtcctatcccaatcagcacagggctgttcataacggaatgggtgagagaactcctctatgcaggtgcaaagtgccgatgaggagactcaatgacccgctgcttgggggacaaggccaagcaggcacggttaggagaactctagagagaggaagtaggggattgggaggagtttatattcgcccgtggatgcgtcccgagatttcgcgcctttgtcgattacctaagcattgccccactccagcgcgtcccgacgcgtcgcgacacgtcgaaactaacttttaaggcttttctcacattcatcgtcatatcgatcctttctgttccgatttttttagtcattgatagtggacaagctccacaaaaagacctacactgcaagtacggagtagtctacagagtatatttcaggaaggcgtataatctttgctatgttttttgccctaggttgctggttatcagtgtccggtcagagtaattcttatttttcggtgtatgtgatagggaccaaaagtctcagggaaaagagcgaacacagtgcttgccaggattttcgtaagtcttctgactttcgcgaacgtccggcgtcagatattatcattattccacctccaaacaagaaacatttactttctgggaatttaaacagctcacggcaaaacctccttccccatccaatcccaacacctccctctccctcctttagcctcgggtgataaccccacaagcacctccaacagcttgtcggctgcatcggccggctccagcatttccctcgttccccaataatccttggtgaactccgtgtgcacagtcccagggtgcaaggccacagcaattgccctttccgcactcttcgtgcgcaaatacaaatcaaaagtcttggccaattggaatacagctgccttacttgcacggtaggaataccatccgcccgatgcattgtcggatattgagccgactcgggcagccatcattgcataaatggcatgcgagggcagcccgagcggcccttgggaattgattgcagagctaacctctattgtcgggaatttcggtgcggatcgcaatggaacgaattgggaaagatgcttcaggagtagcaacgggccgagggaattgactttgaagctctccagcgcattggcagcatcgatttggctaggcgatttttccgcatgtaaaatgccggggattgtcaatccgagcctgagtggtgtgttcgggtatttctggcggattgtgtctgccattgctgatatcgtagactcatctaggaagtcgattagcgttctgatgcagagaagaatttattttcgaagaattaagttgctttttcttacctgttacatcaacttggagaatacggagcctctgttccgcgtcttttggcatacccttgcttgccagcagtcgttctttaagttcatcgcagttcttgcgggctgttgcgatcaccgggagctctgtccgtgtcaggagctgctgtgcgaaggcgaaccccaatcctcgcgaggcaggggttactagcgcgaatccatgagctgccgataacataacttatttgctgaactagtttcgctgatggtatatgttttagtggtgagggatagtggaaacaattatagcaaggagttgctagttaatgttcagcgtatatgtgacgtcacaaatcacaggtcatcgatttaagcttcgatctgatctacatcgtgaggctacaatgggtctaatttaaaacaataatcgacatgtgtatactcagtatttatgacttgttttagattcactctttatctcccaacaccctcacaatctatctcagttctttccctccagaccaacaaagcactctctgccaaactcgttgctgctatcattgaaacggaatttcctgttgagtttctcaatcttcttcatgtcttctgggctcagcttgaaatcccctcccagattggccctgatcctcacaggtgttttagacttcgacagcaccgcgtgcccctgcgtgactgcccaggctgtcgaacaactgcagttagtatcatacagactaaatccatgcagattccacttaccaagagcaacctgagagggggttttgttgtacggcttgcctatctccgccaacacaggctcatcgagcagatgggcggggcgcttcccagcatagagagagttctggtttccaaacggcgagtagtgcatgacaagtataccctgacttcgattccattcggtgaaatcatgctgctggagccacggatgacattccatctggtgcacagcgggaacgacggaagagttcttgatcaagtgctccatctcggacttgttaaagttcgagacgccgatcgccctcgccttgccggttttcagaagctgttccatcgctttgtacgtctgcttttgtgtcaacggctaaattcatagatcaagatatgagaatgctgcatacgtcggcaatgtcgatattcaccatgatcggcttcccatcctttaccggaaagagttcctcccctcgttcccaggccacaggccagtgaatcaggaacagatcaacgtagtccatgtctagatcgtccagggattgctgcatagccgatgccacgtcgtctgggtggtgcttgttgttccatagcttagttgtaatgaagagctcttcgcgtgggacaccgcttttcttgacgcctttgccgacagccttctcagttgcataactagtatacagtcagttctgtacattgagttcgccactcgtctcattcgggaagcaaagctgctcacacgcgtgcagtgtcgatgtgacggtatcctgccttgattgcttccgctacggcatcttcctgtgcatccgcatcctgccaggtgccgaatccaagggctgggacctcggctccggtgttcaacttgaattttgtgggcatcttagattgattgatttgaatgacgattcaacagttcatgttcggctctaatatagagcaactccaaagcacatccaaatcctgacatgattatcaaagacacgtcaaggtgacgaattcatgtttgtgcttgtccggggtgatgacatgaaaatgatgttttcgcagtctcagagtaccactgacgagcgaatgatacctagaatatcgccaaaggcgcgttcgtgttcatagtcatatggtttcaataccctgcaagtagcaatatattagcgctgactatgcatctatccattaacgtcttgcccaccttgatttctctccgactcatcacgagcacgaaccttgacgatggatcagtctatgaccttctcccacccacaaagcaatcacgctggcatcttacggcttctgacatctccgacagccacttaattatccagaattacaaccgccaacgtcatcataaacaatacggagtacttcttcccaaatcatttcggtctcggcacgctcctttgcatcggagccctctgcgccatatccaccatatccaccatctcatattcaagaatccttctcatatcaatcctcacgacgatcaaaattacttccagctgaaaacgaattccttcatcatcgcgtcgttcctggacgaaccaccccgcagatcccaagcaaagatggaaagtacggccctgagccagggaagggctcagtggtagtgttccacccttagatacaatacgaccaccgccaatcttcgcaccgcatatgctcgaaactacaacagattatattctagaagaaggatgagctcggcctgctggctgttcagattggcgaagcacggaacgcagtcctaacaacaccagatttataaagtatctctctaaagaggtggaaagtattcataaatttgcccacttaccgctacgtaaggagatttgggtgtactataaccagcataaccctgggcatgtggatgtctttcatgagacgttgatcacgaaagatggtttatgaacatggatgcaaattgccatccaactgctcggaagaggcgaggttaagggtaacagtcacaaagacaacacagacacctgcatggggacacttgccagtgctaatacaccgggtttgaagtcgttcaaagcaaggcttgataaagaggattagaacccgaggggaagtccctcctgcagctccaacagcaccattggaatgacttggtagaacagaacagtaatcatgcagtcagaatagggtcaatgacaacaagttgcgtagcttccaaaacacgagttacgtaggtctgcggacagagtaatgacccttatccactcagtagcccctttatgacgagccataccattatttttttgcttttccatttgtatctccgttttcagtctctggtatgggaattggccctcctggggagttctccagtctcgccgtcaaaacctcgacgcctgtttctgtgacaagcatagtatgttctatcaattttgatgttagtattgaaatccatctctaaaaggtctatgcgcaccaaattgggctgagcgtttgccgtccaccgtggcgtttgtccagtcatctggccaagtcatatctcggttggttcccagagtgaggataggttcgatcgtgaatgtcatcccgggtttgcatgttcccacggccttattcttcgcgtagtggggaatccaaggaggagggtggaattccgagttgataccgtggccaccccaagtcttaataacggcaaggcccctagaggctgcgtgtttctcaatgatcttaccgaactctcgaatcggtacacctggcttaattatcgcgatagccatatccaaggcctcacgggtcgtttcaacaagcctgatcgattccggatcctttttatcaccaacatagtaggtctcgttcaagtcggcatgatatccaccatggtatagagaaacgtcgaggttaagaatgtcgccatcaagaagaactcggtgatcggggatgccgtggcatacaacttcattcggagatgtacataccgacttaggaaagtggttgtagttaagtggagaaggatatgactgccttacgctttagcgaacaatttgataagttcacataggagtaaatatcactcacctctcgctcaacgcaagcattatggcaaatttcatccaggtaatctgtggtcacgccgggccttatcgccgcagcagttatatcgagtacttctcgagctaacctacacaccttacgcatggcgtcctggccctttgcatccaacaggtcccattttgacctactcaggcgcatctcacgctttggaatgccagtcacggcccagtcgggatgcttgattgttttaggcactggtcgtcgcggggagagtggatatacgggtctgacagagcccgtgaacgggtatgtcggaaaggggtcgtaaactccgctagctatatcgcgattagagaatacagtcacgagtaacttggaggtagttaccattttgtatcttatgcaccgccttgtgtgtggtctagatacggatcaatgttaggttctcggtaagaagaggtccgcgtggacgtaacctacccaatttctcttgaagcagtcttgagcgcagaagtaactacctttgatgcccagctttagacacgttgggcattgcaaggtcccagcttcattgtcgcaatcggccccagagcacgtcccatgatcggacattgttgcgaagtgaaattcgaccttgggtgggccataagagatgggaggagagttgtgtggaaatgcgcgaaagatttggccaggctaatgtacctgaatagaccgccttttatactccgtactgtcttcctattaaatatactgccgacctcaacacgctaggtcgtactccgtataggaattttaaaccggcgtagctggcaggtttcaaaaggcggtcaatttaggtacgttccttggacccaatatttcggaggtcccagtggcacccattatttcaacagtgtttacccccgctataggcccaatggcacagcttatcgagaacctgaaaatcggcggtaagagtcctagaatctgatgtttgacatacacatttagcgacagtataagctaatacctgcttttgactcacagatgctggagtcgacatccccgttctcgcccccgcagtaaacggaacttcaaaagaaacagaggattcggacgacgatgtcgctgaagataccccggcagtagctgttgagaacggcggtgccaaaaaaaaagaaaaacagaaagaagaggccaaagaagaaacaacagaaggttcagacggatccaccatcgattcccttatcgcagctattcccgaacaacacctaccccaagggcgaggaagttgagtataaagacgacaatcgatggcgaactaccaacgaggagaaacgacacctcgacaacctcaatggtgacttcctctctgattaccgtcaggcagctgaggcacatcgtcaggtccgtcagtgggcacagagaagcatcaagccaggtcaaacgctcctcgaaattgccaacggtattgaggatagtacgcgatatctggtgggtcatgatggcttaactgaaggtgactctttgatagccggtatgggatttcctaccggtttgaacatcgataacgttatcgcctattatagcctaaacgccggttgtaagactatacttacgtagagtaatatactgaaggtcgatatcggcatttatataggcggtcggattgtggacagcgcctttacaatagcattcgatcctatatatgataacctactcgcagtcgttaaggatgtaacgaataccggcatatgcgaagcgggtatcgacgtttgggtaggagaattaggcggctatattcaggaagcgatagaaagctacgagtgtgaaatcaacggtactacctacccaatcaaagcggttcgcaacttatgcggccatacaatccttccgtattctatttatggtactaagactgtcccctttatcaagtcggatgatatgacgaagatggaagagggggacgtttttgctatcgaaacctttggtagtaccggtagcggccgatatgtcgaaggaggcgaggtctcacattatgccctgcgcggtaacgcgaacaccaaagacttgactttgtcttctgctagatctgtcttgggagctatcaagaaaaacttcagcacgatccctttctgccgacgctatttggaccggattggacaagagaagtatctcctaggtgtatgaacttccattacggatatgtgattggaaatcttgactaacaagaatatagctgaataatctagtgaaatccggaattgttgaagattatccccctctaaatgagaaacaagggacctatacggctcagtttgaacacgtaagtcatttggctctccatggctccagggctttctaaaagcagaataatcactaatgaatataagactattctactccgaccaaacgtcactgaggtcattagtcgcggagatgacttctaaacatattcgagttgatggttttatgtctcagggtgcattcaaatagttattgaaataactatcatgattagtatattgacctctccccttctacgcatgacgaatgcaaataaaactcccttggtgtttgtttcctccgtgctagtcatcttataaattaccacctgtttccggcgaaggatcgatctttgcttcagaagattttgagtttcggtgctgatactgcttggcagccggtaatttgcctacaatgaaatcaatttagatggctcctatagtcgcagatcatgtgatctctgaatagcttcatgttgacagataaggtgatccggtgatctctacatagtgttacagtacagttataagtcatgtgatgattgttaatttacacgataattgcggccagcggtagacttacctgaagtagtttagcggggagtgtgaaggattgtgtctgtatactaactccagggataagctcaacacctgaagcccaagctcttcagcttcttacaggcagttggtatactagtctatcgaggccaaattagcctcaaaagtcaccatacttgcatatggaagaactaagtggaaacattgccaagcagaccaagctgtttgatgccgagacaaacaacactaaaggtcacacgcgtctaccgtagcttaccgctttagtttatatagcgagctccacccgcaaatttttttctttccttctgcatcgcttggaattctccagctctcacttcttttgtttttttcttttgtcagcttggactgtgtttaatgatggcacatactccagctatattcatggcctgctaaggctgcgaataatgctcagtttcaatttttccaaaaggtaaggaaaatattcttctatccttctcaatcccaaaccccggggatgattatattatagacatgcaaaggcattcctcaatcagaagatccatgttgaatctgtcatacttttaagtttcagccttgtctgacccatcacaacattatcacctttataagccattcattgagtgatctttgactaacaatatttcgctcaggtaaattacactcggattatgtcccttccctccattgcggctgttgcctagcatgaagaaatttgaacgaacgggcggacataatgtacccatctccctgcatccaacaaaaacagagcgtacaaactctgtgggtgtatgggaagtggattacttgttgagaattcgtcacctgaaccattgcccttgtcacaattatttcattttgcatcgacaatttgagaccagtatttctaacagaaattctaggtaatttatcactcatctctttctgcccttctcaacatggtcaaacctatcatgatgaatgtgttattcacactgttggacttggaccttgtgtccgggaatgaacatttatacaaaaatctgatttaatgaggtatgtgttgcttgtcgattgaataaaaaacgtgtttcatgctgactgacttaaagcctgactttagttgccatgtcttgatttcacttttgcctcatgctttttgcttgaatgccaacgctgactcgacataagtgaacaaataggaatacccacaggtgaccatttggctcgttgaccgtgagtttattctccttccattccctgtctcattgcatgatgaaccccaatatactgttctatctctgaactatcatgtcgataaaatattttcaccttggagaactgatcttttccttgtctgccatcatttcactcaacttgtgatatgatcaattgctaatatgcattacaggagccatcggtcatttgtaatagcctaatatcaaataatgaattttctcttctgaacatctgaacactccgcgctccaaaactcccggctttcccttaaattctcgtagccactcgctaaccctttcctatacacttaacccccacgctcattggatgtccctactcgaaaaacaaaccatgcttcttgtgccattgctcaagactatcttcaccgtacacatcgtgcacactcttctttccctctggccaccgcgcccacgccggcttcgatccatccatgatgcacaccatctcgtcgggcaccggcaactcggtatcgattgcggaggcaaacggatgaatcagttcaggccagtggtggtcccaaagccacagcatggaactgcaattcgagcagaagttccgctcggaggagcaaagcttctcgtccggtgtgccgcgatctttgatcccagagtatttcctggcgatgacgttagtaaatatgcacttggtattatgggattataattctagtgtataacatgaaagtttctcgatgggtgttatggtcaaaagtgaaagtaggtggtgatataggtcttacttgatcagatctttgcccttgatgatattcaggctatcggcgatgccgccgaggttcaccgcaccgaggtatccgcctactttgcggcagatgctgcacgcgcatagctggtaaggaactggtgtatgggattgcagggtaaattcgacgccgccgcattggcagcttccttcgagattcctatggatccggttaatgtgcctgtgtcggggatgcaaggcagtactgatgaagcctcacgtacataggcatgatttggtgtgtttgtttgataggctttgagaagctagtgagtagtacgagtatatcaaatagatttttcgatagaaggttggatttttgtccagaattaggatgtggtactcgatatatatacttccatcgaggagagataacaggtttaacaacaaacccaacaaacagagcaaactgcacaggcctcgtatgatcaaaggccgtgtccaactctagacagcggattttccattaatagagctatatccgaatgcccgagtccaattccttaaacgccggattgatctctgcatcatcgacccttcctcgctactgtgattggctgaactactgtttgtcttgtttgtcttgtttgtctctcggaggtttcattcactttcgccgactgatactcatcttgctagctactttctcgtcagtaccaacgcagaatccttttctgttgatattttgagcggatatacgctctgtactttcggaaatgagtttcggagcccccggcggtgggtcggtgaactataagccatcaccgtgagttggattattccaatcgtgcatatctgtgcttgcaacatgttgtccagcgaatgaacgagatcggatctcttgctctgtataattgctgactcaatggaacggtttgcagacccgagcgcggtagctttcctcttgatcacgaaggtacgccagcccgcagtcatacggtccatatcccgaaggaactcggcaagaccagctaatccgatagagctaatcaaaatttgggacgctttaggggaatgcaagcacatcatctcaggatacctgaagtgtatcaagttgaacagaggcaccaacgacgaggcatgtcgcaaattggccaaggaataccttagctgccgaatggacaagtaggctaccccgatataccgaggaccaggcattgtcaatggatgaacaattgtttttgtgatgaatgtcggagcaaaatgctgactgagacaacttgactaggaacctcatggcgccggataacttcgagaacctcgggttggtgtttaaagatggcgcggggaaagcacagactccagttacaccagctacaggtgcaacaaacccagaacagaagagctgatataggactgcgagacgttggatgatattgtatgatatggaggagtggcgctattccgtgatattcaggtagtgctggcattattcaaggcgttgtatataagaaaatgtatttggtacctaatctaacacatggaataagtaaatatgacctgtgcagatgagaaagcatcgaaattcacaaaattatatcaatctgaaccgcggtggcctgttggctcgccctatgcggttccccgcatgtgaaaccgtttccgcccagccactcttacaatctccaacccatccgagtcccatgccaccaaatgtcatcgatcgcccgaccaccagatccctgcctcgtggcaatcatcctcattgtgcgctctcgaaccgggccccgcctcgtcttccactaccccccgaatcccctcagcgagaaccgcatcaaaaccactaccaggggtggacggcgcatttcgcgcaatcgcacgcgatctaagaataccgattcgagctcgagctccgagagcgactcgacctccgacgaagacgaagacgaacgagaaacccagagccatgctggtgggagttccttgctggcgggtcgccgcgctagcaacttcggcctcgatgatcatctccaggttgccacatcgcctgctgccggtgaaccccaacgacctgggtcgctaggctctgggcgtggttcatcggctcggaaacgggctgcgggcaccgatccggaccccgacgacgatgcggggacggcgtctgatcggcctgaagatgggagctctaggccgccctgggagtcgcttttgggtgtgcctgggagtgtgtgggagaaactacttagtccgtctcggtcgtggcataagcggcgctttgaggttgggattaatgatttggcgcttattggttggccggtttttgtgcgcgaggatggctcatggcgcaagcaaagacgcaagaagcagaagaagccccgtgctgaatgggacggaggggaattgggtcacaatgatagtgccgaggagggcaagaaggacgagcaatttgttatttcgcctgatttgagtgccagtgtcgcttcgattgcggagtcattggcatcaccgacaggcagtaagcgtgggtcgaccagtggacggcctgggaaaccggacgagtcgcttgatccggaggacaaagaccatatgacgatgttcaatgtggtgtttgttgtagatcctcctttgctggagtactccatgcgcgtgaaggaaatctacgagaatatcatcaagaaatttgccaaagctctcaaatgggaacaggctcgtactgactatgtgtggaaggagtctcaacatattctgcaagtcaggagaagagcacgagagacaagtatgctttctgctaatagccatccgccggagctaacaccctggatagaaacatcgacccataatctttactccgaattgatatcccagtcttctctagctcgagctatctacacagtctacagcagcatatcggcatccaaaatcgcttccgtatcgctcagcccagatgtctccatctcgctccagattccacctttgacctctacgtcatatcttactggtcctatggacaaagcatacccaggcttgtggctcacgacagcagacagtgcaacccccgccgacgacccaagtgtagatgaaagcagcacgccgcatcaggtcccagcaaagcactttgctctacttctcttagacagtgaagccgccattatcaaggatgtcgaagcatctgggggagcgcttgcccccgcacttgcgcattatatccgatgctccaagccaaccaagtcatttgcgcagatatcagtctcatccggaatcccactatcccatatccagatgctgtcgagtcatcttgtgtactggcgtcgtgctcgcgccatccctccaatccaccaacgagacacatacatcgtctctccaaactgtgacttgagcaagcttgaaatagctacgattgcttatcagacagctttcccaacataccctagtttgcccaaaatgctttccacgctcagtggcacccctcgcccttatagcaacttcatccccagcaaagaccacaaagagatatacttcactatcctggcctggctactgcgcggcggctgggtcacccagctccgcactttcgcgcgaatcaaggtctcacccgaggtcaaaatggccgtggagatggcgctgcgcaaggaggaagtagagcgatacttgtctaggggcaactcaaactcgatctcggtcgatgaggacagcgaccctgacagtgaaaatgacgatgcggactcttcctcgtcttcttccctcgacagccacggcagcggggatgaaacgcccatgcctagtcgactcgacccacacgcacaactgcgcttttctcacaaactcctcgatcaatcaacagctctccggctgtcctctttaattccctccccgcaccgcgcatccccactcgagtcccgctggcttgacgaaatcttctcccgattccccgacactcccagaaccatgcagggagatggaaactccagtccggatgggacgtctaatgatacccaggccctgcacaagaagtactggcctgttttcctcaagtatttcaatggctacgatgccatggagaagatcagcgtgcgcgagaatctcaagcgcaagctcgtctggcaggtccttatgcgcctgggcttagtgacgggtccattgggcgctatggatctcgatccgcgtgaacaggtgttagttagttttcggcactggtaggtggtgctggtatgatgttgatgtagagtatgaatatggaacatgataactatccctcttttacatggacgtaggtttccaggtgtcggtttatatcttccggtgaatcccactacgtagtatagatcagacacctgaggtatgttattttcagtgtaatacagcccgcgtattctgattacatacccactctgccattccgatggtttccgcgtgccctcagccctaatcattgccgaaagcacaatgtttgatcatggatttagtaggtgaaagggaattgaaatggttcgtatttgagttatttagtttaattgggttgatggttctagtatttatatgaagatataaaagaatgacagtgttagggcaaaaatagtagcagttcattcacatgtaaggttggaagcatacaattatatcacattcttttcgcacaatgatcagcacggcagtaggtaattttttttcccgcaaggtatgtaatataatatgcaatatttctccaaatgtattgatatgtattacgtttaccctgaggatttcatcaccggcccgcatatccgaataagcaacggtccaacgggctgaagattataggatagcaaaattattgggttgtagtcgggcatatgtagactaaagttggtgataatatctgtcagtagtatggtattggtgctaggatattttgtcactataagaaagtagtcattcaaagaaaagctcgactcttcccatgttagatatttccattgtgcgccaatggccggaggagctccggtggtccccgcgaggtttagatgtattttttatgtatgtatgttttgccttagattgatgagccgaaagttgatataggtattctgtggtattctgtgggatatctaatgttagtacctgaagagaaactttatatatagagtagaaggtctttgatggaaggtttctagccagaatgccatagtgctatccaattggctggacatttgttgcttaagacctcagaaccctgaagcatcgccacttagacagctattttaatcatgggtctcctgggctggggctgttattgggtaatgccatgtgaagaagcatgcggctcaattttatgactttgaactggttctttgttggtttcatagactgtataaaaagtacattgccgatattgctgacctcggcaaggcaaatacacaactagaaggggacatagcatatataagacagggtattctaggggttcattctgcactgcgtaagaagtatataggtactataggaatatacctctagtacagaatcgtctccgagatgcccgactcctctgtatataggactatatacagggcagtgagatgaatgagaaggaatatagagattcaaagaaatgagccttgaacaattaagaaggtaaatccaatgcaaaggaagtaaaacccttttatgcgaaattccacattcaaaaaaacaaaatgtgcccttcaaatattaattacgtgtaaagaaaaaaccccgctaccagttctgccctgaaccaaataattttgtgtcttctctctcttctctcctacaacttctccccctccgcatcgggctgttttctcccttcctcttccgcgacttcctttcagattccccttcggtacctctccgtctcagagagaaccgagatacttcatctgttccgaaccttcccacgtgcgaatcgccagtcatttttcaagggatcgacactcagcaattgatcttgtgcttcacatccaggttatcgaatcctgacaggaattacacagcgttcctgtgaatccgacttgcaccactcagcgactgagcttttacgacccttttcagcctggagacgttgacaaggcagtgccttaatcgcgtcctcggtgggaaaattttccttaactacactttcctctttattttctgacaacttgtgtgctcacaagtcacggttgttgaaatcagcactccacaacgagaaatcgtcgacccacttatcaatgcgatttgtggtctagacgatcctcaccgatccaactccttcgattaccctttcgcgacccgatacttccgtggtccttcgtcgagctcgtttacacacgaatcgtcctttcgacacacaattgagagtctctctgaaaagacgggaagctgcagattagtggggtcacaagaagctggaatctttccctttcttggtttccactttgcgcaagtgccatctcgcccccagtaggcgtagactgagatccagagttacccaaggtcgtccggtaaaataaaccgcacctcaaatttttttccccacacactcgatcagagctaccataagctctcaatacgacatgtctacgttttcgtacgcacaagccgccaagggcgtctccgggacaccggccctgtctaagacaccatcagaatccgagaagactgactccaaaccggaggaacacaccaccgtcgagactacaactgatgaagcaccggcccccacagagtccgagcccgttcaacaacccgaggtagtcgcagaggagaacaaggatgatgatttcaccactgtcacgaacaagcatgccgccaagacaaaggctatcaactctcgaacatcaagcccgagcgttcgcacaggctcaaaggcgcgcaagtcaaaggaggatgattcccatacccctaatggcaacgcagatgccaccgctgagaagcaggctcccagtgagggacagaccgagaaggccgaaggtgccgcagagaagtccgctgaaaaatccgaggattccgagaagatcgcatcaccacccaaggagctgaaggctgctcctctcccatcagtcaacatttggcaacagagacgagaggcccaggatgccaaggtcaaggctgtccccaaatccacctccactagcaaggccgcctccacgaaggccgcctcgactgctgatgagacccagcaagactccaagaccggctctaagaagaagggtgccgatggtgcacaggaaggcgccaaggatcgcaagaagaccgatggtggaaaaggacgcgatgccggatcagttcccccagtagaagacgctactgcatggcccactccccaagttgcgattggcgaagagaagaagaagtctcacgaaaagaccgaaaagagccctgtcattagacctcatggaaaagaaaagtggacaccagttccttacgttcctactgctgttttcaacaccccgctcccatctgctggtggtcgtggaggtagacgggctacccgtggtggccgggacagcggccgtggagctcatggaaatggaaccgctaccaccgataaggctgcctctggacaggccgcccaaggcgcaaagcagtcacctggagaccgaggacgcctcgagtctggatctggacgtgccgcttctcttcccgcgcaatcgcgacggtccacaagcactgatgccggtgccacagccgatgcacgcaaggcttcccaggcacccgagcgcggccgtggtgctcgcaacggagaggagaacaacaagcaggtgaatggtggcgagaacggcccccgccctcaacgcgagggcaagcccattggaagaagccaggatgcccgtgcaggagaccgcaaccagaagggtgccaacctggctgttgacttgcaggctgcagcccgtggcaatgaccgtcgcttcgaggctggatccaagtctgccgaccccaccggtctcactgactttagccgtgaacgtggagagttccgatctgagcgtggaggtcgtggatctaaccgcggccgtggtggtgcctacgccaacttcggcggccagaatgcccagttcaatgcgtctatgtctaacaacccattccctgcgcctaagtcgttcggcttcaacgagcgtcagcggtcacaccagcacggcctccccaatggagctcaacaaggaaaccgtatgcccctccgatcgccctctgtgcccactcccgcaaacatgtacggtgttgtttatcctttcccaggtgatatcaacacgatgtatggctacccagctgccccgatgagcgctgttccctaccagcaatatgtggagcctttctcgctcatgaatatgctctccatgcaattggagtactacttctcggttgacaacatgtgcaaggacatgttccttcggaagcagatggattcccagggctttgttcctctgaacgtccttgccagctttaagcgtgtcaagtccctcactgaggactttgagctcattcgtcacgtgtcccgtcagctccgtaacgttgagtgccagactggcgaggatggtgtcgatcgcctgcgccccagagacaagtggcagcagtgggtcctccccgtggatcagcgtgagcctgctgcccagaatgagggcgccgcccctgctagaaagaccgacgagaacaccccggttcacggccactccgagaacgttatcaacggatccgctcgtcagttcgttcccaacggtgtcgcccatgatgtcaagacttcactttcgtctaccgctccagaattcatgccctcattgctacctactgcagtgaacgaaattgccaatgtaggatacccctggaacttcccagtctcccctgatgattcgagaatgtcgttcttttcgtcttcttcgtctttccctaatttaattattgactcttctttctcagcgcgtggactagattcgcagtccgaaccccctttcccctttgatttggaatcgatggtgtccccgacaaggtatgctgaattttttgcatgtgaaatatattatgtgcggtactgactcactgtacgaacagctctgatgcagattgctttcaataccaagtcggcggtactgattggttgatcagcaagtcttttgccgaagcgcatcaaccggcgcctaagtcaaatgggaagggccgttcgtccacacaaacgtcaaattatgtcccaaaaactttcaatatgtctcgcaaagaaaccttcgatggccgaggccgacagatgtcaagaaggtatagcattggaatgacccagccttacgaatcctggtcattcagcttgacaaaaaatttcaattcgcatttgtacaatgaatttaggcgttcagcccttgatgatcttttgactcgacacgttgacaacggtttcaacgagctcatggagttttatcggaactgtttgcttcaccgtcgccacattcctgacctcgttctgtacgacatggtctatctttcacaaggtcaaacatcggactaccacactctcgtctccaatacgatccatgaaaccattgccagtggaaagatgaaattacacaattgggggagaatcagcaaatatttcgatacccaactgggcaagacggcgggagaaaagttatcatgagcccttttgcatttctttctgaattttgcttcttcgcgacacgtctccttctactgcttgttcatctttcatgaccagcattattcttttttttgttcaatacggtttttttatctcttgcatgcatattcgccaacttttctagagttccaagtgaccctttcattgcaataacgcggtctggtttctcggtcaactcgaaccttcggagttttctcacctcctttttttctgtttgatgatttcattgctttttcagtcatgggagattctcaaaacgttctggcgtccgggcatgattttactggcagtctctctttcttttgatgcctgccactgcggtgtgccgggctccaaaattcgttctctttttcacccttgacatagatatttccactacttttcttgtttcctttcccgaggttgtggcttttcctttatcgatccagtcaatttgcgatccaggcctttcatcggctctgggtcttaacaagtatcagcatggcaatactcagaaaaaagcacatgttttaaaaaatatcgcctcgaggttttctgtgtttcgagtttcgtgatgtcaatcggaggaatgaatccagcatatctacattgccgatctcttcttccctgttgaccatccattcggtctaccaggttcttctttggacagatcctttgaagtggattcatccatctcagtgcttttttcttattgctggggttcctgcacagaatattttgttttctgtactttgttttcttgcataaactgggctggctgttcgggtctttgtggagtaatatgattgatatgattgataatgcatactatgcaccaaggcattaaatttgctctgtaaaataatgtgaattgaaagacgtgtttgaaactacataataatgattgtcatctataaaaccgcgagtcgagtctgatggaatgaggtcgatcgttcctgcctcaggcagccagatcttgcaacggagataattcaatcccgatccggctctaacagctccctttcccctctctagctctgttcagcacctccagcacaccgttcttcttcgccttttagcctctttacctttaaatccacctttttatcaggatggagggtgcatcccgccaaacgtcaaggctactccggcctcgtggccagaaactccttccccgtctcacacgaacctccgcagtcaacgccacacccttcacccatattcaacgacggacactgtcgaattcccctcggccctttgcaccagagtctcttctcaacacctttagaaccggtggttcatacaacgaaggacccaccagctatttctccaaccgacaaacacttcccgcgaataccgttgtacgatttgtgccacagcagacagcatggatcgtcgagcgcatgggaaagttcgaccgtatcttggaacccggtcttgcgatccttgtgccgttcttggaccgaattgcttacgtgaagagcttgaaggaggcggctattgagatccccagccagaacgcgattacggcggataacgttactcttgagctggacggtgtactatatacgcgcgttttcgatgcatacaaggcaaggtgagtggttcaagggcggttcttggttgttgtgtgggattggaccaatcgggacaaagcaatcgttaatacatcaatcgtcaattctagctacggagtcgaagatgcagaatacgctatttcgcaactcgcgcagacaactatgcgttccgaaatcggtcagttgaccctcgatcatgttcttaaggaacgcgccaatctcaatacaaacatcaccaaggctatcaacgaggcggcccaggaatggggtgttgtctgtctccgatacgagattagggatatccacgcgccggaggcggtcgttgctgccatgcaccgccaggttactgctgagcgctccaagcgagctgagatcctcgaatctgaaggtcagcgccagagcgcgatcaacattgctgagggtcgcaagcagtctgtgattttggcatctgaggctctgcgctccgagaaggtcaaccatgcttctggtgaagccgaggctatcaagctcaaggccgaggctaccgcgcttggtattgacgctgttgctcgggccatcgaggagggtggcgagaatgctcatagcgctgttggtctcagcgttgctgagaagtacgtcgcagcttggtcaaacctggcacgtgagggcacagccgttgttgttcccggtaatgtcggtgacatgggtggtatgattgccaacgccatggctgtctacggcaaggtcagcgagactcacgcccgggggctggcaaagaaaaccctcggggtcgaagacgcctctcggtcatcggagacatcgcaaaacagtcaggtgccgaccttttttgaggaacaggctgggcagaacacacagtcgaatgtcgcctcgcgaactgccgaggagggatttgaaactgtcgccggcgaacacaagaaataagcatctatacttcaccgaaccgaaacgagaacgacgactcctctcttgatgtgattatatttctttctgcctcttttgttgctctggcacctccgcccagtcagccctagtcttcagctcctttggtatatgggctggctgtttcccagtctcttcgacattcttcttgaattgggctctctgaatttacccactacttcccatctccattacttacctttcccgctcttactgcctattgtcttcctattgttgtccggcatttctttaggagtcttccaaaacgcacgagcttcgctgtgtatgtggcatcgaattcgccaaattggttcctgtatgtgtaaatagagaatttttgttgatcagagagcctgcgcggaaggaaatatctcaatgtacaagtatcagtatctttacattgctttccaggaattgtaggtcggttgtgagacatcggataaaccgggtcagattaaatctttggtttcatcacttgtacgattattgtgaatccagtagttggctttcgatcttgattatgctgccggctattcctcaaaagggtctactcaatgtactacagtttggagatagaggccactaatacaagtgcattgctaacagctcttagtaaaaagttcccctggtcctagttagttcaaaccgaatacaggagggaggacaacgtacttgaaaacgaatagaatcacgcagcagaaaccaaagaagcaggaataggttcaatatcgaacctgatctcaagtgaggaactttgatcccaggtcataaccttagaaatataatatgtacccctcggaaagatctccaggaccagatacaccgcgcacttaccaacgcgtgtacccagaagagcctggtactcgggggtgttatactgccatatcagcggcgcgtcacaagccggaggccaggtcagaccattacgcgatgaatataaaacatcctggacaaaatttttggtattgaaattgacaacatcacagacatataagtgtcgcaaagtctgtggctcagcaatctcctgcaaccgggctcgggcaatctgggaaaactgaggtccgtcacttctgaacatcgcctcgacgatgatcagaccccttccaactaggatgtcatacacattctcacagccagctagcccaggatcgccctctgccaacctgcgcgtcagtgtctggttatatatcgctttgttagtgtaccccagtgcgaaggcattctccgcaacctggaatgggatgttatgcttctcggtttgaatgagccagcgtgcctttgtaagatccgctacggtcagggcgttgggctggatttggcatgtgggatcagtggggtcttcgatccatcgttgtcgtgtagctcctccgtcttggatcttgccgtaccgccgggctggggtggaaatggctgggggtacgtctggggtggtgctcggaatccctaggggaggattggggggaacccaagactgctctgaaggtgtcatattgatgtatcagtatcttgtatcgatcactcgaatggtgagcttcattaccatatatagtatatgccggtataggtgtggtacagatatccataagaaagaaaagaagatcatacaacaaaaacaacaatgacctggaagacgacaaggacaaaggcaaggtggaagtttagacgactgaatcaaaggagactgcttctttgagaggcttgacaaagaatgaagagctctgtttcaaaagctttgtgttcctttgtgcaaatacatacttgtttgaacaagacaaacataagtcgaatgacaatataaagcctgggctttattactccatcgagtctttctctccatatttcaccagacgctttgctggtaattcaccaactattgtccaaagcagtattcacatctctggatcatcgaagccaaccctggtcttatcttcagccgcgacaatgtctcttactagacctaaccacctgagctacgaacagcatttcgagcgagaatgcgagttcttccaggaaactctactcagggaggctgactcgctcaatcggttggaaaaccgccgcgcaggaaccattcaaataatttgtgatctgatcgtccagctggaaatcgtcagacggctcgctgagactatggccagaaagtccccgatgtgtccaactgtcctgattagccccccgggatatttccgcggtgaatttcaaagcttttgccgtgcaaagattctacctggtctgattaggtcgctgacttgccttaacgagtcagacattatctatcgcgatatcaactactcagtcgctgctcaattggaggagatccacgaggactttacttttgtcttggatagccgcgagtagccagattgtcttgttaggattctgtctgctttttctaagttgctggattactctagcaagttagatgcccatttatatatccctgtacagatgttgctcaatgacattatctcaggtgaatatgacctttagtttagatacgtcgtatacgtcgcgaatacttcactgcattggttagaaagataacatggtccattcagttcgtattcaaagttaatagttatctgtattatttccagacatgtcatttcgtggcctatatcgtatatggcctgttagttctgcttgcatgtctcttgtagtcttgaacccatttgctctgtactttgtagtagacactttatttaccaactgataaatatcacatactcattttggacctcacactccatgcaccagtagtctaccatcacacttcaattacatattctaagtatacgtagattctaaataaaacaccgtaaggcatcagatgccggcaatggcaccatccaacgattggtttactgacatacttatttgtgccgttccccccacctcagctaatgtcactggtatattaacctccatccccctcattcttctcttactcttctcacatcctctacatcttatctctaaagcaataacatagcctataaatcatccaccatgtctagctctggaaaaggatacactgttaccggctccggcactaacagccaggtaggtataccccgctccatttcctatgttatatgccaacaacaagataagacatgcattcgttcttggtaattccagaccatcatcaatatgtcacttacaagaggtaaattagggcaaccattattgcactcgcgactacggttccagcgcttctaactcgaacagctaccactactccaatacgtaagctgtctcaatgcatatgataatgcagtgaacgagaacagtttattctgactagttgctttagcaatggatcctactactactccaaccccaatggaagtacctactacaacagcgggaagggaagctctacctacacccctccttccggaggatccggcaagaaataagttctcatgcaataacgtcgacaattgattggcgtatcatgaaggcctaatttatccaaagaaccaatgaatctttctgtttcctttataaagatgtgtagttgtagtgtaagcatatctagtagagaatcctcgatcacttaatgctcgaataaattgaagttcctagtcaactgaggtccagcttttccaaggttctctatattgtttgagttggttaccatagagatatctggatgttttacctcttcttcaccaagggatgaagcccaaagacaccgagaccttaacatgcaagcttgtaattgaactagaaaaataacatatgctggtacttgaggactattgaatctctccagttttttcccgtaatcattcattgacgagagaaggttgtccaggtatacactaagtggccatacttccggtagaaccatgtttgccctgctcactttgtttgataaaatcagcaagcataaaaagatcactgcataatataaaatatttcaatggtagtattccccctcaaaaaaaatcaataagtgctagttagtccttgcagtgtaattcaagagactatcaacgcgggagctcggaccaggcaaatctggagatcgcgacttttggattcacgtccttttaatatccggtctctttgaacctgagccctttgacttctatttcttgaatctgtgaccgaggaatccattcgttttgactcttggtcctgccatgttccacgttaagttcatataatcaccaaaagcctagctccgactcgatacgccgcgccgctcccctccctacccacgctctgcgcacattggcgctgatacgtgtcgcatgacctgatctcgaggcacgatcacgcaaaccttcgagaaataaacgaataaccgtgactttgttctgcggctggcgcgatgcatatcataaagccagtttggctcacccatggaggtacggagcttgatcgccctggttttctttgctcgacaccgttgggatagaaatgcagtgcttctgagagcagaaaaccaaggtatccaacgaaagaacgagtttgctaatgtttttgctctgacacaggtgaacgtaaggatttcgaggtttacagctgcgatgtctcgccagatgggaagcgactggtcacagctgctggaggtgagctcgaccctttttgctttgaggtggaggccacaaagatcatgcgccatagagagaattatcgctgacattcttttgattcgctctagatggatacgtgcgaatctggtcaacagaagctatttacggcaccggtacacccgaacttgagggcaagccaaaacaactggcgtccatgagcaaccactccggcacgattcataccgtgcgtttttcacacaacgggaaatacctagcgtcaggcgcagatgacaagattgtctgcgtgtacaccctcgacgctaaccctccaacacactcatcaacatttggtatgcttcggacacactggatacggagagacaaaagtagatactgacagctatggaaaactattaggcaccgatgaaccacctcccgttgagaactggcgcacgattcggcgattgatcggccacgacaatgatgtccaggatctcgggtggtctttcgactcatcgatactggtctccgttgggctggactcaaaagtcgtggtgtggtctggccactcattcgaaaagctgaagacgatagcgatccatcagagtcacgtcaaaggcatcactttcgatccggccaacaaatatttcgcaaccgctagcgatgaccggaccgttcgcattttccgattcacctccccttcccccaattcttcagctcacgatcatatgaacaacttcgtccttgagcagacaatcacagccccattcgccaattctccgttgacagcttatttccgtcgttgctcttggtcgcctgatgggatgcatattgcagctgctaatgctgtgaatggtcctgtgagctctgtggctattatcaaccgtggatcatgggatggtgatatcaatctgattggacacgaggcgcctgttgaggtttgtgcgttctctccacgactttatgcaactgagccgcccaataagaagcaagccgatgggcagcctgtacctcaacaccacattaccgtcattgcttgtgccggtggagacaaatctctcagtatctggattacgagtaatgcacgaccgattgtggttgcgcaggaaatggctgctaaagccatttcggacctggcatggtctcctgatggaaagtgtctctttgctactgctctggatggcacaattgtggcagtccggtttgaagatggcgagttgggctgggccacggcaatggaagagaatgagaaatcactcaccaagtttgggactaatcgaaagggcgctggaatcacagaaactactgacagcttgttgctggaggaaaagagcaaagctggcgagatcaagcacgtcgaagggagaatgggtgcactgatgggcgatggcgccgaacctacgattaatggagataaagccccacaagcatcaaatgggaccgcacctgctcggggctcttcgccagctcccgaggctacgaagacccagacgaatgggaccctttcgacacctgccgccacagaatcagagaagcctgacccttacaaagccaagttggaaagacttaagcagcgtccaacctacaccaaagagggcaaaaagcggatcgctccattactagtttccggagctggggctggcgagtcatctcttccacaagcccgtttgatggcgtctgtcagcaatgaggtcaaggctgatgccccgaccaccatcgttgacctgtcaaaacccttcgatggcttacccaagggtggcctgactgctcttcttattggaaacaagcgcaagctggcccagatagaaggcgacgaagatggcagcgtcgaaaagcgtgtgacacttgccagtcaaaacggtgcaactcccatcatggccaacactcccgacggccttctaccagctcaagttcaatctgccacgactggtcaacagccaactccagaattcattcgccccgcagtcacaaatccttgcatgtcggtcagccaacttcgtctggcagtccctaaaattcgcagccagattctccgcgcgttagattcgagtgggaaaccgacggaacaacctggccctagtacagactcgggctcttctaagagtcgggtggacgtggttttcgaagcccggaacccatcaccagcaagtctgaccggtcgtgccgtggaccgcgagccagtacgcctgacactgttccgcggagatcaaccattgtggcaggacttcttaccgcggtctgtcctacttgtgactggtaatcagagcatgtgggcagctggctgcgaggatggatcaatctatctttggacaccggcaggtcgtcgtctggtaagtgcgctcgttctcgaggcacagcctgtcatcttggagtgcaatggaccgtggatcctgtgcatttcctccgtgggcatgtgctatgtttggaatgtgaagcacttgtcgtctcctcacccaccagtctccctccaaccagtcctggatgctgcaattcatactatgggcgtgactcccaccgccgctcccgcagtaacagacgcacgcattaattcggagggtcgaatcattgtttctttgtctaacggcgaaggatactcctattccccatcaatgttcacatggcagcgcatctcagaagcctggtgggccgtcggcagtcagtactggaacaccacagacgcacccgtgagcaacttgcaggccaaggatgcacagcaagataacaaggatgcgaaggcagctgttgccgccggcattattccttggttggagcgaaacaccacgaatgagaccctccttcgcggaagagcatacttcctccagcgtctcatcaaggttttattgtcacgcgaaggttatgagactttcgagtccagcgtatcaattgctcatctcgagaaccgtcttgctgctgctctgtccctgggtgccaaggaagagttccggttatacctatccatgtacgctaagcgcatcggtgccgagggtctaaaactgaaggttgaggagctcctaaagggtctcatcggtggtctttttgaggatgaagacgaggacagtgaaggcgtcttgaaactgcaggacaaccagcgcgatggccgtaactggcgcgaaggatctgatgatctgtgtggctggccacgggagactttgttgaaggaggtgattctagcgcttggtatgtttctttcttttttctttgttctttcttctctttcttgacgattcaattactaacgaacgttcatctaggtaaacatcgtgaccttcaacgcgtgacagttccttacgccaagctgctggacatggttgacaatacctctgaacatggcgatgcaatggatctttaatgatgttttctctcttgctatctataccttttcttcttcttgctggcgttcaataagttcgggctgggtcaacccaaagggtttgcattattatctctgctgaggcgggattggagatgataaatctcattttcatggtgtatttgtatcataggttcacttttgggtcgttattatttaagccaacctgttcctatcttgccctagtttggtcttgctctaggatcaaccagacagaccctaatatccctcgatacacacagtattacgtacatgacacccacatggatgtagtgacgtcgtcagggcttgactctcacgtgggcggtagcagctctgcaggcagaaaatttgaagatatctggcgcgtacctcgtcaacattgcattttgatagctaaagacgcattcatttactctctttgtactcatagaccttgtccgcaattgctgtggacaaccgccatcacgtcttccaaaccatctatcttcttccttcgtatcgtcgatcgatccgcagctggtcctgcatttggcgcgttccattcttgttcccgcttccgcctttcaacttccccccacctcccacttctcttctgtcgcttctactcaagcaagaagaaaaaatccaataagatgcctcccaagaagcagcaagtccaggaaaaggtccttttgggccgtccaggaaacaacttgaagagcggtatcgtatgtgagctaggcccccacccattcttttttttttttcctttttccacacagcacagtccacttttacttccgaaaaactatttaaacccccttgtcccccttccctcccgccttttttttttcttttcctcaaccatgattgactaacaatatggcttcaggttggtcttgccaatgtcggcaagtcgacactcttccaatccatcaccaagtcctccctcggtaacccggccaattttccctatgccaccattgaccccgaggaggctcgtgtcatcgttcccgatgagcggttcgactggctctgccagcactacaagcccaagtcgcaggttcctgccaatttgactgtgtacgatattgccggtctcactcgcggtgcctcgactggagccggtctgggtaactctttcctgtcacacatccgcgctgtcgatgccatcttccaggtagttcgctgcttcgatgatgccgagattattcacgtcgagggtgacgtcgatccttgccgtgatctgaccatcatcaacgaggagctccgcatcaaggatatcgagtttgttgagaaggctcttgatcttcttggcaaacagactcgtcgtggtggacagtctctggagatgaagaagctcaaggaggaggaggctaccactgccaagatccttcaattcctgaaggatggcaatgatatccgcaagggtgactggacccccaaagaggtatgttggaatttttttcttcttcttttcccaaatcaacttgccctttcaactcctttcctgatgaataagagcactgctcgaaattaacccagctcgttgagtgccctcattaaaaggatactcacaatccgagggcaccttgagaaaaaaagttatatgctgaaattttggagtccacttctacatgattgaatcactcatactctttgtgaatcctcatgctaaccgaattggttataggtcgaagttatcaaccctctgttcctcctcactgctaagcctgttgtgtacctggtcaacctgagcgagagagattacatccgccagaagaacaagtacctccccaaggtcttcgagtggatcaaaaccaactctaccggcgacccaatccttcctgtctcggctcagttcgaggagcgtctgaccctgatgcacgatgatgcggccgctgaggctgagtgcaagactctgggcaccaagtccggtctgcccaagatcatcaccaccatgcgccagtccatgaacttaggcagcttcttcaccactggtgaggacgaggttcggcaatggaccatccgcaagggcatcaaggctcccgctgcggctggtgtcattcacacggacttcgagaagaccttcatccaggctattgtgtacaactacgcttctctccgtgagtacggtgatgagaatgcgatcaaggctgctggtaagattatgactaagggtaaggattacgtcgtcgaagacggcgatatcctgctcatcaaggctggtgctgctaagcactaggtgcacatagacaatagttcttcaaatgaaacaccagtgttgagtcttggcattttttccaactgtaaatttccttgctgttgcaaatcatcattggtaggtcaatgttgcagaatatacctcatttcccttctgtatgattcttgccttggtatttgaaggctaagcctacaatagctcacattcatagtgaaagatcatacattctattgtaagctgttcagcatgaagtcgaagcaaaaaatccgaagcacttaatttggtcacgtgaccgcctccccgcgcatcccacttcggtatcaagagcttgattcttatattatcaccacctcaacaagcatcatgtttaagaaagagtgagtcaaacgcttctcataaacccacgactagcccagtggattgtttggtgcctcttgtctacccaatgggagcacatatctctctctgtttgaagaccgggaaagactgcaggagctgtccaatgctccattcaagaccacacagcgcccatgggataaatcttgttcaaaaagattatcaaaaacaccagctaacatccgtgctccatctagtattcccccaagcaaccgatctaaggtgaagtcctcggtgcagcgcggcctgcgccagaagctgctggaaacatacccaggcctcgagcccttcattgaagatgtcatgcccaagaaggcctcattggaagccgtgaaactgtaaagttcccattcccgcgtcttttgtcttccgattccagcaacgtcatctctggctttcgacatgaacgtgctgcatcttttctagagacccaaaagctaaccacaaccaccgccatagacccgatcgcgtgaccctctacacgatagactcaacccccctcttcttccaacctatcgatggacccccagtcccacacctccgcctcatccacgcctacccctccgccatcccgacaatccagatcgaccgcggtgccatccgcttcgtgctttccggcgcaacgctcatggctccaggtctcacatcccccggaggccgtctacctgatgccgagcatgcgcttgaggccggacagatcgttggtgtcaaggctgaagggaaggaggagatttgtatggttggtatgctgaaggttggcactgaggagatcaagagtaaagggaagggagttgttattgatgagggccattatcttggcgatggactttggagaatgcatttagattaagggacatggttttcaaaagaagcaagggattcattgggctggggttgtggtcttttgggatgtttggcttggaactatacctttatacctctatacctctctgcacgcatggcgatgattatgtgttggatgatttgaaatgaaatatccccctggacaaggatccagattggttcaatggatgtattgattgaatgtagatagcttcttgtattgtcttaaaaggctttgtaatttatgtaggagaagcacaggtacatgattactggggtattcggaggttcttaggttgaaatatatattttgacgatggggctggttcgcagaaacttcccatttcccccttttcatcaatgtcttttgatccagtcgacacttatttcacaatgcattccaacagtggaaaatgccgattggagttcgctcatggtatgtggcatagctaatgccacaaagccgcaattcaagcagcccaacgacaatatgagattgaatcactggcaacacgactgacccatggctgatattgagcagaatgggcgacaaacgacgtctggaatcacgggtgcaattatctagaccagaaactgtctagtgaaggggatatgtcgaatgtcaacgaggatgtgatgtccgaatccgcgagcgagaccttggtgaaatccgagggcgacacatctggaaacggttccttcactggccagacctcccaggacgagctgactgaggacaaattgccccgaaagaagaaaagctcagtcaacaaagtctcgacacagcttgtgctagccatatatgtaagggagacgactgcaagcaacgcatctgaggatgaaattgaaacggcaaaacataccggccttaaatccaaatcacgtcgccggaagattgaaaaaccagagaaggagcaaaaagaacacaagaagcagatgaagcagaagaaagccgaaagcaagcagtacgaggaggagaagagtaccccagcgaggaagatgggaactagagaagaggaacctgaagaacgacagttcgaagagcacgaatccaaggagaaagccgaagagatgaagcttgcaaagaagcagaagaagcacagaaaactcgaggcgaagctgagggaagaatcatgccgaaaagattctgcggccctatcaagtcggaagcggaaggccgacaatgaagatgaagttaccacgacttcaactacggcaacagaagaaacagcataggacttggaggagtgatcagataggggccgagatatgctcaaggatgaagcatgtaattcattcacacagttcacacagtctaaatagggaaactggtcatgctccgtggagaataatgagcctcgatgctacgagtgcctctggtcgagctcaacggttacagttacacaaccggcgtctatgttgctttctttcctagacgataattgactcaaacttccaggataatctcccccgaatgtctctggctgtgaaaacaaatctcctcgggtctagtgatgccctcgagcagtgatgatgtattggacgaagagagtcgtataaaaggaccagagaaacaaaacccacatggatcacaaaagctgtcctcggtgatattccgaaggccatagctgattggtacatggatgttgggtgttctcgaggctcaaaatccgttagagggaatgtaatttgaatctcaaatgccccgaacacgtatagtgtgggagtgaagaagtagaaattttatctccagggctggaatatcaaataacgacaacaagcagagagctgggaaggctcgtggattatgattattataaatgaagtgaatatagccaaaaaaaaaaaaaaaaaatcaagctcatgcatgcatcaaccgattacatacctagtctacatcaatagatgaaacctcgaaaggccgaccaaccacctgcaaaaaagaaaaaaaaagaagaatcccatccattcattaccattcctccatgaataacccaattctcgaaacatagttctcaattctccagaccttgaagctgaagtcataccgagcgtcggcacataccaaagcccggcacataccaaagcccggcacataccaaagcccggcacataccaaagcccggcacatcagccgatcttcaagtggcaatttacaggagagcgaggacaccagccagaagaccagcggcggtagcgggggcaaccagacccatagcggcaccgctggaggcagagggagaggcagagctggtagaagtgccggtggtggtggaagtgctggtggtcagaccggtggtggtgccggtggtggtttcggtagtagagctgccggtagaggtgccggtggtggtgccagtagtagttccggtagaaattccggtagaagttccggtagctgtacgtacagaggtatcagtgctgtgcttgccaggggtggggggactagtagtaagggagccagaggtaagggttccggtgggggagggtttgatgatagacacgtccagggtggaagtaccagtagtggaagcctcggtttcagtggtggaggcaccagtggaagtggaagtagaggcagtagatgtagaagcagtggaagtggtaccagtggagacaacagaggtagaggcagtagaagaggaggagacagtggaagatgtaccggtagtagtagagctggaggagctctcggcggtcacattgaactgctcggactgagcgaggatgccggtgttcttggcctcagtggagagcaggttgatctggaaaccggaactgcagtgtacattaagtgttagtagacatacaatcgacgcgccacaaaggcgatcttacccattgctgacgtccttcagaccactggcagtgtaagagcccttggaggtgtcgatgccagaggcaatcttctcatcgacgggggggtagacggcattgttgacaaggacgatgtcaacagtggaggcgtcggtgctgtaattggttagttttggctgtcatggctagtgtaagatgtgagtgatcatagtcgacatacttgacggatgtccatttcacggtgaaagatttggacagatcgaggtcgtcgcccttggagggctcggtgacctggatagctagactgattattagagagagtctcgcgtcatatggtgatttacatacctccaacggaaagggccaaaggcaggagagacagaatggtggagaaacgcatcttgacttattaaagcgaatgtagtggattaaaaaaacgaatgaacgttggagtgtaaaagagcgagagagatgcgagagagaagttggaagatggaaaaatattcagattcaagggtccatgtcattaagtaggtgaccaaacatttcatttgatattgcacacaaccttggatgccctgaaccgtcaacaatgtctctggcacccactaccaatacggaaagatacctgaaaatagaactgacatggcgaggtacccggttttagagcatcccaaaaatattttaaacattttattatacacaacgtgggaattcagggtctcagtaaggttccatgtggaagtaagtagagcttcatggctcgccgaggagctagtttcaggcgcaaattccactttcgattttggggaatctgactccgtgttccgtactctattattcgatgggagttccatattataattgtgtatacttcgtatattgtatgtactccgtcgttattttttacacccggaggtggcccgtccactatggatcccagccatcggtgtggtccgccgatagggtcgataagaggacgctagacaggcttggcaatccgctagtggtatttggtacagtcttggcacagaaccgaacccgagcagtatgaaacggcgaattacgtatgtatggtatccgtatttttgaattgcaaattctgcggtaaattacagaaaggcaatctggaccctgaattttcatgtatcttttcactagctcgagcaagggtgttggccaccaatttgagggaagatcagcaaagcctaatcatccatggggtaaggggaatcaaaaggctgcccatgagtactcataaattcatatccaatatttactccgtacgatgtctcagaatgaactcgaaaatgctgcgaacacaccgtttcgatgtctcaacgaagacccactccacagaccaatttcaggattgagacatatctgaatttgggtctcggacgacacgctaaatgaaccataagtgggagcactggaggcgataaaatgagtgtctcagaacctgcaggcacgttattatctctttacggacagaatggtgccatttcccagtcaggtagcggtcaaatacggagtcagatccgaatcagtaaattcctttttctgagttatgatttgtcgaatacggaaggaagatacggagtacggagtgcagttcccaagtgttatcccaaatattagatgttgtacataattttcgcaccggagaatccccggggatgcgccttgcgcccaacaaaagattaggtatcgtagatatccacgttactggtagtacggagttagtaatcaagccacaatcagtgctctgtacggtgtactcggctgggaaagtatacatacaagtccctcttgagaccatcccggtccatggtagccgaatcgacccagacgctagcactcatcgcctggacaccgaagtctccataccccttcttgttgataatgacaggtttcatgctaggatgcaacaggtcggtccattgctcatatgcatgttgctgaccgacaaacatgcgctgcacacctggaccagcgttgctgataacacatgcgagtccggataggtgacgggcgtttccgtagcgaacgaatcctgtttcgcagtcagatctgctagtgtggatacgtgttccccatagtggggcgcagtaatccaggggtgaaagggccaagcgaacctatgcagttgggttggttgaaataatcctgctgttcgccgtaggcatagagtttccgggcttgagttaggacgggaagatgaccgttgcaacttggtgtcattgggctatccacattcgcccgtatcccgtacaggtcaccatagaatacgcatgggtgaccgtctttgcggaggaggaccagtgcgtatgctagtaatttaaaggagtgcgccactggggtctgggctttgattagccgtgctcgggccttataaaactgggaagaagttgactcacctccagcatttgtcctggttgctgctgagagttaggtaaagaagtaaatatgccaagatcagacacagttggtacttaccgtatcgtgattcgaaacaagggtctggggaagttagctttgtatcattactcgagcgtcgaggaactcaccacagcgtggtccggccgacactgtaccaatgtatctttgaaaatcccgcgaagatctggtgccttggcatgggacaacttggagaaccgctccaggagaggtacatcatatgcagcgagatcatactctaccttctcgaggtaatgcagaagggacggtaaatgtccagtccagtactctccgatggcgaaaaagtccgggttggcggttttccgaacatattgcacgaatgcgcgttggaactcggttgagaaatgcttagcggcatcaagtcgcattccattgaggcttagggatttggtgatccacgttccccattgcaggaggtctgcgcggacttctgggtgtgtcaggtccaaatcggcgaacatcaggtaatcgtagtttccattctccgtggacacatcttgcgcccagtccttgttggatgcgacaatcttgtagattgcgttttgcttgctcttatcgtcccagtcaacgccgctgaaatgttgccagtgatacttcattgagctgtacatgtcaccgcgaccggcgaaatcaaagcctgtccagccatggacttctgtcggcttagatatatccagatctcttcctgttgttttattttaatcagcgaaaatccatgattgaatatcaacgaagagaaggataaaatcgctcacgtttaggatctaccttgacagcctgaaaaggctctggatagtccgcgccagctttatgattgagcacagcatcccagattacaccaatgcccaagttctgcgcttggcacatcaggtcttcaagttcacgcttggtgccccatttcgtgggaactgcgcccttctgatcgaactcccctaggtcgtacagatcatagatgtcatagccattaccattcacatccattcccttgcatccgggagggatccaaatctgatcaacgccgatggctttgtactctggtaaggcattctgcagacgacgccagtgctgccggtcggcgggaacatgccattcaaaggcttgcagtataagcgaattatctggagcattccatgatgggagctgttgtagattcgctgctgcttctgtaccgtgtatgcaggttagagcttcgaactgttttccggtcggggatactgaccttcaatctgtttccatttctggcctttctgtcgagatccacaccacaggaaagacggcattgcgggataccaaatggcaagtcaagcagtcaagctatgtcaatgtccagctaaatagtagttaactagaatatgcatatcctcccttttagggcttggatgtggggcgactatatttgacttcgaactgttgtaaggtacaggttttgcagttggaggtgtctccatttattattctcaaattattaaaaatgtctcagacgaaaatttcacccaaaggaaaattggaacttttctagaagaaaactccacctgagataatctcattggctaccgccggccataaatgcgtgacatgtaagataatagtaaataggaaaaaaagcccataatcatataaaggccaaagggcgtgtcaggagggaaaagaccaaaaatatcgccaaataaaacaagaggtcaaaaatatggcacaagaaaggatatctccgcgaaccaagctgagtcgtggctcaatggggggaaaaagggtaaaaatagaaaatgaagaccggaagatcggaagaagaatgaagcgaatgaagagagaaggaaaaaagaagggctgtcgaggaatttcaaacgagcatgacgaacatgctggtcatcacggctagcagtaaggcggctacaccggtaccactggtaaattgcattccagccgacgtcgaactactgccagtctccaacatcgcgagggtaacgttcgtctcggagtagccacaaagaccactaccctccatatattgcgtggggaagaaaacccgtggctctcccttgttcatatcgacacgcagcaggccctggttgtcgacagtatagttcttacagttcagaacatccatgatcaccgtgccagcattgtaagtaactgccatgtcgaggttgtaagccccactggtcgagggttgagtggacaacaccatgactacttgtcgaccctggacaccctttgtgaaaccgagctcactggctccctggtagatcgtgtgggtcgagtcctcaaagtagtttgtgcccagtaaggctgcgtggttccgaatgcgattcagtttcgcgatcagctggtagagcaccgcattggtgtcgtatttggtgagccagatggcttctcggttgacaggcaccgagttccccttcaggtgttgctcttgaccttgatatatcatcgggattccatcaaatagcatggtaaacactaagacatttttggccatctgccaagtactatcattaacaaaagcgaccagtcaacccgaggagggcacacataccgctatgtcatcggagtagctaccaattcgaggtttgtcgtgattttcggaaaaagtggccatagcattgacatctggcatggtgattctcatgttctccactgctttcgccaattgagacgtattgccctgggtaaacgcatctatgatttcgaaatagatcggataatttggcaaactgtcgatgtagttgctctgataatcttccatgatgctgactgccccttcaagaacttcacctgtcatgaaagtgtcgacaccattggaaaaattttgtaggaaacccgtattaacgtgcttggcagcgtcaatgcggagtccgtcaatggaataggtcttgatggcgttgtttgcccatgcgatcagaagctgttggacatctgcatgctcggtgaaaaggtctggcagcggcacgtctagatcacctgtctgacacctttgcgcgtcggtcatgttctcccagtttttgattttgcagtagggatggaaatagtctgcgttattgaagggtgtaaatactgagtagtcgatatgtgtggccgggttgctgccatttgtgatgtacgccatgttgttgattaccgtatccatcatgaagtacatgccccgggagtggagagcagcactgaggtcgagcaagtcttgatgcgtcccaaaatgagagttgagggtgttgaagttcaatggccagtacccatggtaggcttcgccataggagacttggccatggatattctcgatgatgggagatatcatcacagcgtcaaatcccatcccttggatgtagtccagacgatcaatggttcctcgccatgttcctccgcaataaaagcccgcggtggtattgcatggtgctgttaatgatccatctgtgcgagcgaaacgatccgtcatggtctgatatatcgatctgggcttccagtcgactgtccttgcggctgatgccgaggaaatgaggcccgtgatcaagagccctaccagacggccaagggtcgatcgtgacatcatggcagctcgtatttgtgtgatgggtcgaccggaagaggcgaaaaagagagtactgggctttcagataaagagtgtcttgattaactcacgagagggcaaagatggccggcaagtggaataaatgagtgacatttggactttatccaggaacaggaaacgaaaggaggcaaagaaagcagaagttggtccctagacaggaaaagatcggggaaaatggctagtcaggtggcacggcttttcaaggttctgttgtccatccatacatgtcttggaaccttccccccacaaccacgcgttatattattatccggccagttgcctcgggatatctgcaccaatggacctgattgccatgcgacctacccgttgatatgccccgggattcagaaataaaggtatgattctagtggcttactttaagaaggactaactacacatcaagcgggggctgcagaaatcaattttagtttcattatggtgtaattgtgggaggggaagaagcgaaagcgacttagcacactagtaacgacactattggaacaaggagtacagagtacaggagctgtcaggtaccaggcaccttgctggaggttactgttgattggtcgttatcacgtggagacactgccctaatctcaggaacggtcatcaccctatctatcacaagagaagtgacgaacttttgacggtccaatcatccgagacaaagtgccatcaatctaagagactagcgacgttactttgaatttccacaaatcgggtccaagctatagatagtactttggtacttcgtaccgtaccgtatagattacagcgtatatacgccgtatggagtaccccgtaccttgaattgatacaccaaacgctttggccttggccctgggcagttgaatacgagatatggcgatacaaaagtttgaatgaacaccttggcaaaattttacgattctatacgaattttaacttgcaccagacacccagatactacaatgaatatatacctcgaacaacgcaagaaagaaaaaagggataaagatgtgggaaatgaacagagataggtgtaatccggtgtgatagataagtgaactcgggtggctgtacgagatttgctgcgccattctcggcttcccggacttccgtctggagtggcgttgataccagtatcacatcacggtaaatactccgtactgcagggatgtctgaccttgtggagattaagtcagatatttcttttgcttgttttcttgtacggagaatacttccaagttttgacttaaataagatgcatagtggacatgttagttcttggttcctggtttcatggaagttatccgtcttggcattattccttgtttaccattggttgctattgtaaaccttggaggaatatttagatttgtaccatggttgagcccccgggaaaccgaaaagaagaagaaaaaaacccttgagaaaggggaaggacgaaaaaaacgaaaaagacggagaaaacgaaaaacgaaaaacaagtgccgtacaccatctggtataagcccccggtcgtaaaagcaccaagtgggggtgggtcttacctcaacgaccaatcggccgggtcgggctatcatgatctcggccccctaacccacgcgggtcatgaccgagaggtatatcggcattttgataggctgataattgcgggcctagaaaatcagcagtcggcagacgtgaaagttgcccactacctagccccgtcaggctccaattaatactcttttaaccgaactaggtgtcctattcggcttttgatgccaaggacaggcgggaaagaagaataaaacaatcataatttatatccaaaggagaaaaagatttaaaattacaattacaattacatctaattaaaccgaaaaaggcaaaagaaataaaaattaccgaagctgagacgttggaacccaatatactccaatacagtctggggctctaaaattgatatggagtttgtctcatctgcttttatttttatcttgagcttcattgcgactaggcttttagcttagcatttagcactgcgcactgctgttatgtgatcatttctttttcacttccacaatcgattcttccttcgtttacatccctcatctctcgtccatcgtccatcgtccctcgttcgctcgttctccttccctcgttccttcgttcgctcgtttgctagtccgcctgtcgttatcttctttggcttactgccacctttgacgccttctgttgggaatttgtgacgtgacctttgagatacatacctacatcccactgctctatggcaattgagagctgcacatcttcatctctttcatagagtgtctcatcctctcatcccagcggggatatccgcactatctgaggcgcgcgaccatcactcaacagcttcgcgcagtcaccagtcatgaagtggctactcaccagcggattggtctcgcttcttgcgaaaaccgtcacagcttggccatacgacgaggcctacctagattataacctcaatgagaataagacggccaccaacccagcagattactggggaacatggcctggccatgaggggaaatatcacccctctccaacaaattggcgcttcccgttctactctctcttcttggatcgcttcgtgaatggtgatcctaccaatgacaacgcaaacggtaccacgtttgagcatgatattgaacaacgcatccgccatggtggcgatgtggctggcctcgtcgaaacattggattatctccaaggaatggggatcaaggtttgtctcatctgtgatcttctagtggcaagaaaatatatgctcacaatgttcagggtctctatattgccggaacctccttgctgaatcagccgtggacttcagacggatatggagttttggatacaacgattctcgacgcgcattatggaactatccagacttggagagacgccatcaccgaaatacacaagcgcgggatgtatgtcttgttcgacaatactattgcgacgtaagttgtccccgtgtgcataaacaagagaccagtgctaactgaatatatccagaatgggtgacttgattggatttgaaggccatctaaacacatctactccattctcggagaaggaatatagaacacaatggaagactgaacgccaatacagagacttcaccattggagctggcgactacaatcagacctgtgactaccctcgattctggttcgaagatggataccccgtgaacgaatcagagacctcaggcttggttggatgttacaacagcgacttcgatcagtacggcgatattgaggctttcggtgtgtggcctgattggaagcgacaactggccaagttcgcctccgtccaggatcgtctccgcgagtggaacccgactgtgcgcgaaaggttgatccggcactcctgcatgatcattcaatctttagatattgatggtttccgctatgacaagggcacacaagctaccgtggatgctcttggagacatgtccgctgcctaccgagaatgtgcgcgcgcagttggaaaagagaacttctttatcactggcgaaatcacaggtggaaacgactttggtgccatttacctcggaaggggtaggcagcgtaaccagtggcctgagagctctgccgaaacaataaagttgacaaatgagtcctctgcccagtggttcttacgcgaagcgggacatgaagccatcgatagtgcagccttccactatacgacatatcgtgccctgactcgattccttggcatggatgggcagctttcagccggttatgatgcgcccgatgactgggttttgggctgggactggatggtgcaatcaaatgatttggtcaatgctaacaccggcaagttcgaccctcgacacatgtttggtgtgacgaatcaagacgtcttccgttggccatcgattgccaatggtacacatcggcagttgctcggttctttcgtgactacattgatgctccccggaatcccacttcttctttggggcgaagagcagaacttctatatcttagatgccactgcggagaattacatctatgggcgacaggcaatgtcgcctgcaaccgcgtggagaactcatggctgctttaacctgcagtcctcgcagtactacaagtggcctgttctggcagctaaaaagggctgtgaggatgtgacagttgcctacgaccaccgcgacccttcccaccctcttcgaaatatcatgaagcagatgtatcacttgcgtgaacagtacccaattctcaatgacgggttttacattgggaatttgtcaaagaaaaccgactacgtttactaccctggttccaatggaacggccacggagaccggaatgtggtccatttaccgggatatcaataccaatgcgcaaaaatacgaatccaaatatcaaccggtctggcttgtttaccaaaacctcaatgacacaaggacatacacattcgactgcaactccgacaatgtgactaagacactgactgctccattcgattctggtaccactgtcaagaaccttttctacccgtacgacgagatcaaactggtggatggagtgcgcaaactcggcttgaatgggtccacggagttgaatggctgtgcggaaagcttgaaaatgaaggcatacgagttccgtgcatacgttcctatcgctaaacatcaataccctcggcccatgatcaccaaattcacccccggccatgatttcccactgcgttctactgtggcgcccaaccttccagagaatgtgacggttgagctttacttctcggaagaaatgaactgtacctcggtgaccggggcaattaccatcgattcatctacagagactgggaaggttccaaccctagattccgatactgtgaagtgcacaactatctctcccttgctccaaacaaattggactgctgagatcccaagcgtttggaagtggacagcaaacctcactggagtgtacaacggaatccataaattgactgtcaccaatgttaccaacaaagacacaagctcttatacctacgctgttgatcacttcctcttccgtgtcggccagttcgataaccctatggtgttcacttccgccaactactcgagcagtctactccacaagaaggacaacggcgacctctttatccagcatcatgctgctggtgcagacaaataccgttattcaactaattgggcatcgtcattctccaactggaaagaatataaaggcggaaatgataccatcgagaggctcccatggtcaggaaccaagaaacaagaatgggacggtgagcatgtgcgtgttgagtactggagtcgtttgactggaagtagcgactacgtgcagcaaggtgacgctgactgggaccacccagtcacacgacgtttcccccatgccttcttcaatggaccctacaaccagtatggattcgacgggggccttgacaacagaatcacactcgacaccaaaaccggagtctggtcctaccatttcacgtccgaatggcctgcagtcggtcagctaaatatctggggaattaacccagacggaaagcccgatcaaacctgggttttgggtgatatcgacaatgacacagtcctagaccgaagcccaccgtctgctctgagcgcgactttgatcaatatcaccgccgcgccagcgaaaggctacctctctcacaaaatctacttcgacgatggaactctccatttctggctcgatccggttggacctcagtccacacagattgccatgttcgtgttattctggatcataccattcctcactgccgtgggatgtgtgtacatcttcatgaagtctttctataaggtcaaattcaaccaggtcggtgtgagtgagaagcaaaacattccgctcgcaatttggaacaagatcaagacgtccagtggtcacagggatcaatcctcaaacccactaatgcgcttagccaacaaatccggcttcatgcaaagcaccaccgctctgggcggagctcttgcttctggcaagcgacgcatggttctaatcgccaccatggagtacgacattgaggattgggccatcaaaatcaaaatcggtggtcttggtgttatggctcaactaatgggtaagaccctaggtcaccaagatctcatctgggtcgttccttgcgttggaggtgtcgactaccctgtggaccaagaggcagagcctatggaagttaccattctcggcagcccctaccaggtccaagtccaataccacgtcttgaataacatcacctacgtcctgcttgatgctccagtgttccgtcaacagtcaaagtccgaaccctaccctgctcgtatggatgatcttgacagtgcagtgtactattcagcatggaaccagtgtatcgcggaagccatcaagcgattcccgattgatacctaccatattaacgactaccacggttctctcgcacctctttacttgctcccaagaactatccctgtttgtctctccttgcacaatgctgagttccagggtctctggcctatgcgaactctcaaggaaagagaggaggtttgctcggtctttaaccttaacgaagaggtcgctcgtcgttacgtgcaatttggtgaagtgttcaacttactccacgctggcgcaagctatcttcgtgttcaccagtcaggatttggtgccgtcggtgtttctaagaagtatggtaaacggtcctatgctcgctatcctatcttctgggggttgcataagatcggcaatctgcctaaccctgatccatctgacgtcggtgagtggacaaaagagccaaccaaagagcaagatatcaccgttgatgcaacatacgaggctggccgtggtgagctcaagaggcaggcccaggaatgggcaggactcgatcagaatcctgatgccgatctacttgtctttgttggtcgctggtctatgcaaaaaggtgttgatctcattgcggacgcaatgcccgctgttatcgaagcccggcctaacgtgcagctgatctgtattggccccgttatcgatctctacggtaaattcgctgctcttaagcttgaccacatgatgaaagtctatcccggacgagtcttctcaaagcctgaattcactgcacttccgccattcatcttctctggggctgagttcgccttgatcccatctcgtgacgagcccttcggtctggttgccgtcgagtttggccgaaaaggtgcattgggtatcggagctcgtgtcggtggtcttggccaaatgccaggctggtggtacaatgtggaatcaatctcaacgtcacatcttcttatgcaattcaagcttgcaattgaggctgccctcaattccaagacatccgtccgtgcaatgatgcgtgcgagatctgcaaaacagcgtttccctgttgctcaatgggttgaagatcttgagatcctgcaatctactgctatcgcggtccacaacaaagtggcgaagggtaataacaacaacaatcgacctggcacttcttctggagtcagcactttcagtggagccctgtcaccttcaccttctatgactcaactcggaagcccacttgcttcacccggcctgaactctccatacacgcattctagggacagcagctattccttcaaccaaatgaacaaccttgcccctcaaaagaaggtcagctacagcgcagatacaaacctggacgacatggagaaaccaaagtcgggactgagccgttctctttccctgggtgttcactcaggtcctggtcatgctggacgtcgcagagcagcaaaagaggctggtatctcagaaagcgatgaaaacggagccactgatgccgaaggcgaggatagcagcgacgaagacactgcccgcaccgtgtttggcgatgacgaatacactctcactccggctcaagtcgaggcagggcgacgagcccaggctgctcaaagagaccgtcctcaaaacctgccttctccaagccaggagtctttacatcccaggttcatgcttcctttggaaagcccgggatctccgggcacaccaccgagcgcggacagcctccttcttcctccccagccatttggccagtccaatcgtttcagcagcgcatccgttctctctctggactctgttgtcggcaacaagacagacttcaagctacagaaggttgatcctttcttcacagatagcactggcgagtactacaggacgtttgataaaaagttggatgccctgaacggatctaactccgagtcgcaactttgtatcgaagagttcttggtcaagagcgagcaacagtggttcgacaggttccgcaatgccagactgggtcgtaccaaatctcccacaccatcgattcgacactcatcaaggaacactgataccccagacaatatgttctacagtgacgatctcgtctccaacattaatagcaacgaagaaaatcatctccaggatgatgagttccttctcggaaaggactatgtccctcccagtggacttaagaaatggatgcagatcaaaattggagactggccggtctactccattttcctcgctctaggccagatcatcgccgcaaactcataccaaatcactctactcaccggtgaagttggccagaccgcggataagttgtatggaattgcaacgacatatgccattgcatccatgtgctggtggctcgtgtaccgctacttcaagtctgtcgtttgtctttctactccgtggttcctatatgcttttgcattcctcctgattggatctgctcactggcaagatgattccttcagtcggggatggatccagaatgtcggtaccggtttctacgccgcggcctccgctagtggatctatcttcttcgcttcaaactttggtgatgagggaggtgctccagttgaaacctggattttccgcgcctgtgtcattcaaggtattcagcaggcatacgttattgccctctggtactggggttcgacaatgaccaaggcttcttcagagggtctcttgagcgctgagtcaggcattgccaatagctggaaaatgaggtgaatagccccgtacactgatctccttccttactttactaacattactccagtgcgatttgttatcctatcactgtcttcctgtgtttcgtaggcattctgttggctttgggacttcccaactactaccgacagaagcctggcaaggtgccgtccttctacaagtcccttttccggagaaagatcgtcgcttggaacttcgtcgcggtcatcctgcagaacttcttcctgagcgcaccatacggtcgaaactggagttgtaagttcaatcttcccaatcgaactctggcataccgatcagtactaacattcctctctcccagtcctatggggttcctcgcacgcccacgcatggcagatcgtcatcctctgcatcgtcttcttcggcgttatctggtgtatattcctcttcgtcgttagcaaattctccaaacgacacagttggttccttcccgttttcgcctgcggcctgggcgcaccccgcttcatccaaatctggtgggccatctcgggcatcgggtactatctcccctgggctgggagttatacttccggcgcgctggtctctcgcagtctctggctatggctcggcgtgttggattctatccaaggtcttggattcggtatcatcctcctacagactctcactcgagtccacatgtgtttcgctctcattgcatctcaggtgctgggttccattgcgactatctgcgcccgagctttcggaccgaacagcgtaggccccggtccaatttctcctgacatgactaagggcgcccattccttggctaatggctggttttgggttgctttgttctgtcagttgttgatctggtatgttgctccttgcttgtctcgttcagcggaattatttctaacatttatctgcagtgctgggttcttgctgttcttccgcaaggaacaactcgccaaaccataagctcccttcatttttttggagcatttctgtttcttgtcatacaccggctacgcccatcacgatgaacatgaatgatcaaattaatctcttctgcataattgaagcatgttgtccccttgtgatctattttctttttctttttagatatcttaatgttaatattattgtactgagttcatactcagttagaatacatcaagtcctcgtagtgaaatgacgtaaagtcgtatataggtgtctaacaatgctgctttttctttatcctagtcaatgacatgaattctctcaaagagcacaagaccatccaaggctcaaattgctcgactgaatcagtccttgttttattgggcttccctaattaatggggtagtttgatgaagcttcagattcgtctttatacagttcaatttggaaataagcaacgtagtctctatactatttcgtgagcacaatgctgtcttctcctgacttacaggctcaacccccctttccaaagtccgagaaagctcttccaatgagcattattgttagccgatccctgccatactggaccatgagagttgtcgacccgagatgtcagttccatcaccaatcagcggtatacttacccgacctcacattccccactaagaccagactcgcatcttgactcttagacgcagctcaatggaattagtggatagttccgggccaatcaactccaaccccagatccggggtcagagaacagtgcggggttgagggctgttcagctcccgtgaccagtcctgatattggtattaatatcgtagaccatgtaggagactgagcccatttcattcaaaacctatcctggaattaataagcttgttgatccgaacgcattgaattcataatgtccaaaactcgagacacagagaaggacattgatggaggttgtatccatttggagtattcagatgatggaattgcacatccaaccaaggaagaatatgcacggtaaaccaacttcccagtttatcggcgaatttgttgctgaaacctccaagagtatataggaaaatcgacaggcggatcctgccgtttgtggcgttgacctatttgttatgctacctcgatcggactaatatcggtgagaaggcgaatgcttccattggaatcgttcaacagtactcttacttatgactatacaaaggaaatgcacgagtcttgaacagtggcaccggcgacgatctgatgacctctattgacatgaacgaccacgaatatcgcattgcccttatgctatttttggtggcttattctctatttgaggcaccaagcaacttagcaatgaagaaattcactcctccggtgtgagacttcgcaccctgacggtcagatgggtatattttttgctttactgacactcatgactagctggctggcatttcttgtcatttgtttcggcgccctgtgtgcaggaattggagggtcaaaaaatgcttcaacactcatggctctccgatttcttttaggtgcatccgaggctggtgtttacccgggaatgatcttttttctcagcttctggtacggaccgcgtgaacgagccatccgaatcgctgtctttctttgcagtgccacgctagcaggtgctttcgggggtatgatcattccgaacgcgatatgtcaatttatggatgctaaaacttgtttttataggtgctattgcctacggagtagctcatatgaatggtgccggaggcttacaagcatggcggtggctttttattatcgaaggtttaccatgtctcgtcctagcagttgccattttctttttcctgccaagctacccggaaaaggccaattggctcactgcggaagataaggccatcctcaaagcatcctttggaaataatgtggctcgagggtacatcacaaatctacccacaacaataactaccgaagctaatctgattctttctacagtgaggacaagctcaactgggctgatgcaaaggcgactctcaaggatcttcgcctctgggttcactatgtcctttatctttttgtcggaataggtgtttcgtccctctcattatttgctccggcaatcgttcagggaattggatacactggactccaggcgcagctcttcaccatcccaccttacgcatgcgcatatgttgtggctctcacagcggcatatatatccgatagagttgtatgccgagggttgattgctgccctgttcgggtttataggatttgttacgtttctcattcccggtgagttgtactcccattctcatactggtcattgatttctgattctcaatatagcctgcgtcccgagcccatcacttcatcttcgttacggtatgcttgtgcttagtgcatgctctgctttcgggtcgctacccccactatgtgcgtgggtttcggacaatgtccacagcactactgcggcatcggtagcaagcgggttgaatattgcatttactggaccaggccaaattataggggtgtggatctaccagagtcagcaggctcctcagtaccagacgggccatgctgtcaatgccgccagtcagttcatggcaatggtgttggcactgggcctatggatctattaccgacgacagaatgcaaagcttgctccgggtgagcagaagtgggttgcataaggtgaaattgagtgactgccagtccaagaggattacgtactgatgtcggaagatgttctactcgacagcagatcactataagagatcattacgctcgaagagcaacatggacatgagcaagtaaacaaaattatatatggagaaaatgaatatcccaaattgtgatcggtagttcagctgttgtgtcagaaaaagagagcggattgtttttctattgggcttgctattctaatgtcgatatatatctcaattgaagaatgtttatttttactacggagtaataaaccaacgaaaaatgtatattcaaatagatcagtggtaaccagtgccattctcaaacgaacaaaaacaaaaaagaagtcagactatcgaagctttaccgtaagaaatcgagcgtttaccttgttgatagttttcgaaagtcaaattcttataagacatcgttctatgtagctatatagacagtgctcgggcaaatttcgcggacatattagattattcatgtgtaaagcgagacaagttttcaatatgcaagttaaacatagttagatatctaaggctatcgaatgagtatcaaacatcaaaattttccagggagtctcattgcaccatcaagtctcagacagcatccattgagcatccggttcctaaatatctccaaaacaaacccgccgaactcttccggtttccccgctcgctttggccattcaaagtggtcctcgatagcctttcgtgctctttccggcatctttccttgagcggtcatcggagtagagaacatgtttggcgcaatagatacagctcggatgccgtatcgggataggtccctcgccaatggcaatgtcagagaccgtatggctcccttggtagccgcgtaagccacctggccttgctgcccatcgtacgctgcagccgaagataccataacaatcacacctctttcggactcatcgtcgggatcgatcgactcgggtagttgagccatgtgaggaacgacttgtcggatgaggtcgagagacccgacaaggttcacgttaatggcttgttgtaacttcgcaagttccagaggctcgaaggaggaattcataatctacatcgctttaacaccggaatcctaaatccgtgtatagaatcttggtccacgcacttttcctggagctaggatgcccgcacaacaaactaccccaccaatcggagctttcgtattctgactccactcaatggcatcactcactcccttggtgatgtctgtagtgcatgatatgtcgaccgggtagaacctcactagctcggatggaagatcttcttctgcggcgtcaataggttcagccaggtcaaacaaagcaacgcgcgcgccactatgagccaaagcctgtgctgtcgcccggcctaagccggaagatctatattcaaagtatgtcagctgggtggtgctgacgggtaaatcttgtgtcctaccccccggtgacaatgaaggtcctattttcaagctgcattttgctcgaatgctctttttgaatgtgtagtaggcctacactagttgcattgaaatccacttttataagtaatttctggtatctactcggggacctctgcctggaataaaatattacgccaagagaggtcgggtgtcgggtaattctttcggaaagtagactttcgccctcgaatggaaaatagagatggggaatgagcttgtagtcgtaatagctaaataatggggaacataaagccgaacaggtcgagggaaatgtatcgcacgtcgacccgagcattctttgctctttgttggtctgttacttcttgtagtaggcgcgcagctttaccagcatgaatgctcgcatgctcgccccctggtccatagtcggatttcaccagactcaattggcgaagcttagcaatacaccaggcaactttgaccgagtcggcgcattcggtcgcaaatgtgaacagagcccacattgctgcgctgttgagaggcgactcatcccaatcatcaatgtcagatacgaagttttcggaaatcacaattggctggtcgacactaccacgaagttctgcccatgtattatcggctgctgatctttcatctccttgtgctaaatggtcccaccatgcagctctgtataaataacaaaaattagaccaaaagcatgcccgaatcacgcagagtaatcgagaaatatctttcgcaagatgtagttgtaatgagtctttgagttgctcgaaatcggagttcaaaattacagggcggctattccaaagctggtgaagatcgttgataatctgactggcgctggcagtgacttccacttcatcttcgatggacccacgaggccgacggtggcgatccaacatagcaattttgcgaaggaactgctgtgacagacgatggaaagtgaaggcatcacgaagaatgctttcctttaatgtcggcagtgggctattggaagggcacgacgtcaacgggtctcgccgccttatctctggtcgtaaccggtcgggcggtggggataaaaggtccatttcccttgaactttgctgcaatggtgaccccgcatccgcgactgggtgcatcgacgggtttggagggccgcttatgaaaggtgatactgaggttggccgacgtgtcaaaatgccgtttcctccgaatatgacaagtttcatatcgcaaagaactagccaattcaatatttgctgtgttaacaaatcggcctcatctagatcttgtataagacaatctgcccattttatttgatgggctcgatgaatatcctccttgtcgatgagctactccatttgggtcagccaatgttcgtcaccgacgacagatgactaacctcgaagcaagtgagaagaaagagtccaattagcagctctcgacgaagagatgcagacggcttcacctttagctgctcgagcccctcgataagcgactctctggcaaatatatacagataatgagagaggttttcgccgtttcgtagagcatgtggacctttgttgtgttctgtagttgagaaaaacttgttaaagtggagctgggagagcgccacgattgcgtttgagatagtagagctgccacgggccatagccagaatctgacaacagagatcgtgccatgaggtagtatccacacttgatacagcaggaacaaacacatgctcttggaagtatcttcccaatgcatcggaacgacgagtgatgctttcatccgctccagggtcggtagttgaacgcgccgcaaagaagatattcgtggccatccggttgaaatttggaactatatctcgcaaaagattggcatctttgctagacgagttggaggtgggggcggattggtgggcattgctttcttgctcctgaagagcctcagttaccgaaggctcggtttctttggggagatggtagcgaacattctctgcggtgtgcttaattttcatattagcggaagagtcagcgatagaatctttaccgggcctcatacaggcacgtcataggttgagtttgtaacgaaaggggcagcgccatcatgacggtcatgctccaatgtgatggcatcctccaacgtcggaattgccaggccttgtggctccggtagcaaggtcgatggggaacaccataaatccagagcattccgagagaaggcgtcaaagtcaaagaacaaagcagtttctgggtaaaaggcagggttgaggctcgagtcaagatccatcaactcgtcaacgtctcggtgattggttgaagtcggtgactgatccacattctgctgactgggatgtgtgccagggctagttggtctctctgtctgccaacgcttcgatggaacccgtcgatacacacattcagctcctagtcgggtacagttggcacataccggagttccttcatcgcatctcaccttgcgcctcttgcaggtggtacagccggctcgtgatcgaggccccgatcgacccaggcgtctttctggtcggaagtcggtagatgcagttgcaggggacatttcagattgggaatgagaaatacccgaaagaatcagtttctcttatatggaagacatgagcattgccgaggtcttcgcccccacgtccttttgatgctcatcagagccaaaacgcggggttaatgagcgtcacctgatctgcagtctgcttacaacaaagacttggtctgcaactagttacagtgttctggcgaaaagaaattatcaaattatctcacaatctaacttcacgtggatttcccagagcttcgaatgtgtcggcagcccaattactaaatgcctttcgagatttcacggcctcgatatcctgcttgtttactccccttgcctccagagctgggttatatccgagacgtcgtcgtccgtcaacctgatcctggatttcagacgacaagggtgcaactttgtcatcggcacgacctaaaacagtgacaactgtagcacccccgaggcccatgttgtgctgcaggcagtatttggtctgcggtacacaacggtttgatgcccagccacgtagatgccatactaaatctacattagcataatcccctatataaatgggttgaattgaaggtacctaactcggccgtttgagcaaggcctgtcgctcccagcggatgacccttggaaatcaatccgccactgggattgatgatccatcctggagacgttcttttcgttttagaactttgatcatacgtgatgcctccaccggcgaccagcttccacccttcgccgtgtggagctaggcccaagtcttcgatcgcacacatctcgtttgtcgtaaagcaatcatgcagctcaatcacttggatatctttgggtgatagtgaagcctgcttgaaggcattctgggcagcacgtcttgtcatattggacccaatcagctcgatggcgctcgcgggctcatacaaatcccgagagtcagttgcaagggcttggcccctaatggcaattgcgcttcccttcaggtagggatgagcttgcaggaaacgctccgacactaggaccgtggcggcagctccggtctatcatattagtacacactggtgtatgcaggcggggtttgataagaatatgtacttaccgaggatggacagcattgtagccgagtaatcgatcccgacacctgtggactcgatgaaacttccttggtcgtcacagactgacgcagctgactgtatggattgttcatgccatgcgtacggttagtggaggcaatagcggcgaaatgctctgcttttgctccgttcgacccgtatttttccaggtactcagcttgggtgttggcatatagctgaggtgtccagccagctgattctgcttgaccttcgggaataaaacgcttcgaaagagccagaattcttcccaggggattctccctatccttataaatctgtggaagagcaccaggatacattttgtcaaatcccaccacaaggacacaatcagcactgccggcctgaataaactgattggccatatacaggcccgtactccctgcgctgcagtagttatgaacattgtaaatgggaactccagtcatccccagggtgtagaaaacacgctgtgcgccagcagagtcaccaaacacataacacccaactccctgatcaacatcatcatagttgattccggcatcgagtaaagctttcacacatgcggatacggcgaggttgaaataatctccctcgggattggaggaggttgcagctgattttttgggagactgaaatggggtcatccccacaccgacgatgtatactggggaggcagtcatattgattgatgtacaggaaaatgagaaggagtgcacaaattatatcgcaatatgtagattagcgagcttctcctagacccttttaaacacgcgaagtgtaccacttaatagttcccgaagaggtttacaaggccgatttacgatagcaacaactaattacttgcctccatgtcggaatgatattggaaccgagcattgtcgtcactatcttcagtcctcgaggatgagggtgctcgggtatcggataaatctcttggcgctccagcattctgctcgggtatagcacccaacagcaatctaactgaaagcctcatgaaagtttccatattcagtcacctcgctctgatatactggcaagaagtgtagtcattcgtagcaagtaagttatagtaggtcgcagtcgtgtaaagaacacagaagacagtattggggcttctataaagacccagtcaccgggagtagtagaacactggaatatgttttatcgattccgtcattttggcttaatgattgcttttcaacggcgtactcggatgaagagaggacgaatatacaccgattctccaccgcgatatgataatgtaagccatggataaagtacatattctagcctaaaaaccctccaattcagttgattcaatatttcaatcgtgtaaaaatgctctcaaatcagccttctattgtctatggcccgtcagctccgatcccggtgtcaatgacatttggggaccttctatcctaccatgcacaacacaggccagataaccatgcgattatatcgcatcatcaaaatatccgcttgacctatagtcagctcgaagagcgtagcacgtcgctagcaaaggcattctccagctataacgttagccggggtgatactgtggccatcatgttgggcagtcgaacggaatacatcgaagtaagtagtactccacgaataaatagcacctgaagtgtactgactatctagacattttttgcgtgtgcgaaattaggtgcatcgcttgtccttcttaatttcgcctttgttttagaggagatcgttgataccttgactccaattggtaagggattatttctcattctactaattgtcgtagctgatgcggttctcaatagccccgaagcttctcgttatgacacccagctttgggaaatttcaatacgagaacattctattaaagctttcaaaaatgcttccttctttgcaagctgtggtccttgtggatccgtacaaactgaaggctcaaagcctaggagataaaatggtctcctatgaagtcttactcaagcaaaattttgccacgagcttgcctggcaatgtttcgcctcatgacattgtcaacatacaattcacatctggcagcactgggactcccaaagcagctgcacttagccactacaacattatgaattgtggcaagaatatcagtgcccagatgagcataagcgataaggaccgagtctgtcttcctgtgcctttgttccacagttttggacttatcattggtaagctgctcatcctctgtgagggttctgataatgctaaaattgcgtgaaggtatttgcaccagcacgtggagtggatcaaccattgtattcccatcggaaacgttcgacgccgatgcggtgttgaaatgcattgagggatatagatgcactggcatttatggagtcaccacaatgttcatcgaggagatgaagaacccgaagtttgcttgcaccgatcgctcatctctgaagttagacttctgtccaataacgctcgtcgaccttttaaaactgactcgtactagatttggaatcatggcaggatcagcaatgccacaggatttgctggaaaaggttgcaacctccttcccagttcctcgcctctacacaaattgggggatgacggaactttcgtccattaccactatgacacaccacagcgatccaacccccaatcgtcttcacacagccggtcgccttttcccgaacttcattgggaaaatcgtggagcctaacacaggccgagttctgccgtggggacagaagggagagattgtgatctctggatatggagtcatgggtggagggtatcttcgaaatccatccaagaccgcagaagcgatgagacaacacgtggaagacttggagccccatggagtcggacctgtggacagcgagggaaatcttagaacgtggatgcacacaggagatgaagggtattttgacaaagatggatattttgtgatcactggacgcatcaaagacatcatcattcgcggaggagagaacatttccccggtagaaatcgaagcacgactttcctcccacggggcgattgtccaggcttctgttgttggggttccgaatgctcgacttggagaagaaatagctgccttcgttgaactaaccaacggccatgctaaacctaccgatgaagagctccagaaatgggtgcgagcaagtctcagtcgcttcaaaacaccaaaacacttttggtggataggtagtccccagcatggcgttccccgagaatggccgaagactgcatctggaaagcttagaaaaccggacttacgggaagtcgcgaaaggtgagttaaatttgtttccctccgattttccctagacaattacactgacggtatcgggtatgacagagttgttggaggaggtgccggaaagagctcgactttagagagtcgggtctaatttttcctgtttctcctcttgagtttttccatgtctaccgtgactcgatcatgcgtcttcaatatcaagagcccagagtgcatgtcacagccactcagccaccaccacgcaaatcttctgtatgaagatccgccccacgggtgtggatcgcgatcgtcaactttaaagcttctttgttgtgccacatcttggcggatttggctgtaggggaataatattcgtaggaaaggcgtcacattaagttgatcgatgagcccgggcaggggggacaggagagatggcctcggctggagaacaagctgttgtgatggcctcaggcccgaagccctccacagttaactaccatctccttgtggtcatacaagcctagcaggacttagcaataaacaaaccaccattgagaatcaaaaataagactgtatccctgtagaaaaattaatattattctattataattaggagaaaagttaaaaaggcaagctgtgagtctgattgccagtcacatcaagtctatataaatcccacaccaagaaacatggtcatccatcatctggaaactctgtcaccagtggtaggtatcggctttgccagccgcagacaccaacacagtgcatattcgagcggaagtagcaagataagaattttgttgaagcggtaggacagggtaaccgtaaaaatcgccaccacagcatcgagccagtagtgatttgcggtagcgacgatgacactgaggaccagaatcgggtacaatatagcgagtgccaaaaagccaaactccgtcatgtaggacttctgcgttggcctgcgctggagcctttgcagaaatccggagtggtgaagaaaggtgcacccgatcacaaaggcataggtaaagtgcaggctgggcatggccgcgaattggttcacggactttccgccaacccagatgctttcggcattgccttggcgcacggtgtcgtagaagccatacgagtctggaaggagtcgtggcggcatgagtgggtagacacagaataccaagaaagcggcgagatttccaagtgtcattgtccgccgtgcggtcgcgaaagacgcatggttcttggcaacataatagtaccaggagaggaatctgttcatttggtcaactgactattcaaattggaactatatcaagtgaagggttactcacagcactgtgccgggaatgtgtattaatgaataaatgcgattaaagatagtcaagatcgacggatgattttgaataaaaaaagattggaaatcggcttcgttgatcggaaatatccaagacgcggttgtatgttcaaagttgagaatgtcgatggcgtggccccgcgcaacctcgacaacacctatctcggcgggagaaagccactgcgccgttgctttcgtcacagaatagaatagatagttcatactccagtagaacatctcaaccaagaaaggtagtttctgcagaattctactgtgaatgtggtgcgcccagcgagaagagtctccggtcttgacattgatcccgcatacagtttctgatttgggttgcagactgtcgatggaataagcatcgccctcctccagaatggcgtagcttcctaggtattgagattcattggaactcttgctagaatccctgcgacgattcacaatcaatgacccaaccataatacccacaacgacctgttcacgacattaatacacctttagcgatatacgcagtatcaaacttacaataggttcaagccatgcgtgtgacgctaattgtggcttacccagatcgggtgtatcctgagtaaaattggtgctgggcaccatacttgcaatggtagaagcttttcagaaatatacaaggtaaagcctccaaagacgctagagaatagaacaaaattgaagcaaatcaagattcaaaaagaggaaaagggagacaagacaggctaaatggatgctgtcgtgtgccctctaaccacgttattccaattatgcataatacagacgatacaataataatatacgagtacgaacttcggacggcggaatgattacgggaccgaatcccgaggcgggacatagcaaggagattatattggtatttgccctcctttaacaggccgagctcgttaacgggaataaatgcgttcatttacagtttgtatttccataatgatctctctatagaacacatttagcagaaactcagtccatttcttggagagaaaaaaaccagaaaataaaagctcttttactgccaatgacaattccaacgccatggcttggatggagtcgtaagggaggcgttcagctagtcccgaatagaacagacaagagtcccgattggcttcttcacattacgtacgtacctaggtatgcctccttgatccaaagcgggaacatatcgacctatcacgacatattatccgctctatccaatgattgtactcgcactcacctgattaccaggatattgtaggtccagctttagatatgagacacggacaaaccactgtccgaagtcgaagccaattattcgtagggagtacatactgtacagaaaggtctggatgcatatctgtaaggctgtaaaccttatcgatcttggaatgtgctttgtttgcattctaactcaaaatccgagcttgaagggaatctgtaattccaatactacactgattatttccatcctggggcagacccggagccatactttggaatgtgtgtttctaacaataacagccacttggaaactcgactgatgagaggaaaggcaatgtaagctgacagagatttatggatacataagatcatgccagttcccatgtggagtaaatcgaactcaaccttggaagttgggactagacgttgtcttgaacctcggcttgattttttatgcaaacgtcatcattgttgaccttgcaaatagccccctaagtttcgaagttctatactaaaaaaaagaagaaaagaaaaacaatgacctgattaatacctgattaataggggttcgtgaaaatatgccctaaagcaaggttagtaacctagggttggtagtttgttgatgtagggttgaaagaagggttgaaaatagggacgactaaatgtggataagtcaagctccccatgggaacctggcgcatctaggctcagatttcctatggactggtccgtagatgtgttaaatcttgccttcaaactgctgatccgcttgtggcttaccgtcctaccaacttatgcagttcatggtcatggattcattcccgaggtcgattccgaggtccggaggagcatccatggatgtcaactccgtagacggtgtgtattcataattaatactccaaattcataattcaactttaatgtggcaaactcgaatttgtgtgcacgtaatcgtctccagcccgacccacgttcacgagatggatccgtttcactatacggagtataaattttcagcttacacaaactacgaatctttgtggcacgcctaactatgcgaaaggtaaatgggcattaagattgtatattttcttcacgctccaactggccaaagcgaaaataaggtatgtaaaatcatttatcagatctaattgagagcaatcgttgctcgtttgtatactcaatcatatggtaagtgaagaaaatccaaaatattacgactatgtaccctttgtatgggtgtggcatataaaagatactcgtgtaagacaacatgcaaataagacaaataaactgcgcttaaccaatccttgtccctctgccacgcgtttctgactccttatcatgtttaaggttttcaatttattgcacaatgccattgtatgaagcaaggctattatataacaattcaataaatgacgattaactacccattttgagatgtagttagacatagtaagaaatatttgcctattataaatcaaaaaagagcaaaaaagggttagaactatcccgtgacgatcaatgttatcaaataagacatttgaacccctatagcaatcaatttcaccctaacaacctctggcgggaacggaagttggtatccccggccgggtacgagtatcccgagtagttttcaacatccggagaaactgacctgtccgtgatattttaccctggatatggggtgttccgatcgaaattgctttgttggagcttgtatctcgaatacattctccttggcacctaggtcgagagagccagtcagaaagggcaagtctagcccctagcatgggatttgcttgggagggctcagccggttcggctcgctagggaaagagattgaagtggagaagagaaaactatgataagctcgcaacctttacctgcgatgttatcatatgcagatcaagttcaatgcgctttggactcagttctccacgtcttctccccgtttccaaattatgccaacaagagacgttgacgaaaaagacgctggctaaaggctgcttggggcctgaggcaataaggctaaccattttctaagaagctgacaaccttgaagataactgcttaggtgtgttttggaatcattgcctacatgtgaacggtctgtggttggaagtatgcaaacttatgctcacagtcggaatgatgtctttccattttcataaccactccaatcctagatatacccatgcaaggtgattctcaaaactgataatacagacagaaacgataactttggctatttaataggcagatataataatcttgacgttgtaggtgctcgatttcactgtctgccgcagatgtgtagttgccgcaaaccctacggagtacatcgcacctgctttatgcaatgatgccaatgttatatacccgacgcaggcaccatgactctctctacaactaactagcctcagtcagcaagtcatacattcgcttccagcccttccatcatgaaaaactgggactacgggaagctcgccattgccactgccgcaattctcggagtcctcacactcggcgcactgatatacttgctgctatggtacgttcgacgaggactgcgcgcccggcggcttcgtcgccaggagaaggagaatgaccagtttgaccagtccgcagtgtccctcgccgaggacacaagcaggaccctagatcacttcctcatgaaggatattcaacctgagcggagttcaatcatcttcagcagaagccgatccccatccatcaacatcgtcattgacgacgcggacgctaatcgctgcaagtcttcccctcagccttatctcccagaacatcacactgcagcttcttcatctgcagttacccacgtcctctcacagatctcgactcaaaaatctggtcctgatgacccacggactcagtggagcagctcgggacagcgttcgtctagtacgacgccgcgggcatccacctcgtcgtccgtcgtcccagcatcgcaatcatcccaggtttggactacgacttctggtagcacaccgtcggagcagactcagagtgtttcagcacagcactcgtcgaccacgacacctcgagcatccatctcctcgtctgtcgtcccaacagcggggtcctctcaggtctggaccacgacctctgccgagactgagacgttttcgctccttagtcaatcctcgaactactcgcaccaccctcaaagccccattggcccatccacctcccgcagctcacagatatatacacgtcgttcgaatgcttctgctgcatcgagccgtccgtccagtgggggtatcttgcagtctgcatcccgtatgttcaatgaagcagaggctgctcggatggcttattcgaggaatatcgactctgttggatcaatgagtcccacttcccccgtctctccggtgttagtggatgtttcagctgataacaagctcccccaatggacctccgtaccgcctaccccctttcctttcagtcagctctgatctttgatgacacccagtgggctttttgaattgatattgcttatttgccgttgattcagacccgacgaggacggattgagatggattcaggttccatgcatgactagggttccattccttctatttgcattcccttcaaaccgttgatgtctttggaagtcaatgttgttaatcaaattttctttactgatacctctgatccattatgtacagcgtccgggtcttttttagggctacaatgtttactttttattcataaagaagtgcagtgatgatgagttagagatgaacctaaaaatatattccattgtgagtagttgaacgtgaaagaatcgagcaaaatatatagaactaacacccaaggcctgggttcatgaattacttgcgttgatttcttttgcgctttttagcgaggacgaggcctttatttttcgtgcgccaatcccagtgggtacttcctcctttcattcggcgtgtcatgagttccagtacagcaatggaggatctgcctctagatagaaacattgctgataccagcgacatcggtaaactcacgatgtctgtccaaaaaagctgctgttttggcatgacggtccgctttcatttccgacgttctaggaacccgccagaactgaacgctcatccccctctcctcccacatttccacctccccgagaagacactcccaaaggtcccggttcctgattggttccccagcacgtgtaacccagctgtactgtatccaatcgtatacctctctcgtgataccgtccactacatattccgagtctgtcgcaatgatcaaacgactaaagccatccatagcccagtctcgatatctcagagctgcaatgacggcgcgaatctgcgcgcggtcgtttgtcagcgtgtgatgttggccagtgggccctttgtactcgagaggaaagcgtgcgtaaccagatgcagactcgttgtagacaaaggaacaacccgctctggcgttcggtctgccgttgtccatacacgtgccgtctgttaagatgaggaattcatcctcgacggatcggttgtcgtgattcagacgaatgaaccggtggactcggtccgttgctgtgactttggggcaatgtgggaacaatgactgcggcgtatcatttggatgcggaggagcgaactctgtggggatgacgcgaccactaccgactctaagctccgtatagagtcgagggagcatgtggggcgcgaagtattgcgcgggattcacttggtggaaggacatggtggtttggtaggccatagcttcaaggtttagcatctgccggtggccttagtatatcaggcacaaaatgtaccttcaaatacagatgaaggtgtcggagttggataatagggagatgacgggaacacgacaaaatggtagcgagcctcgctccttccatacttgtcctggatgcctcaggccgggatgacaaaaatcaataatcattagttatatttcttggtgaactaccaaaaaaataagtaaagggaatctccacgcgcctcgctattccagtactggacacgctgcagaggtaaaaaccgacaaagattaaaagcacatacagaagcaaagttctcgaacacatgtccgccatgagatatacaggaaatgatagctgacacaaaaagaatgtggaagtaagtccttgagatctatccggatatatcatcttcatcttcatgcattcgtatcgcgcacactgcgtaggcaccgttcaagccgtttgccacgctccttttcgcgtacaagagtatccttgacaaacgatcggatggcgtcacggccaaccctttcccgccaggaggtccagccagcgagttcgcccaccacgacatccttgttccacgagatctctttcgccaaccgagtagactcggattcgccctcacgaaccttctgttcgaggtcacggactgacttctggcgagactcttcgaagcctggcaggtttatattgaatttgcgggggagggaagaggagaggagcgaggagcgagagcgagaggtatggcggtttgttgaagagagggaggacatgagggccagtggacgagatagagatatcagaatggcggctgttgtgttgtcgactgaggaaagagctgccaaatactgcaggagaggggaggagtcagatctagaggtcgataggtaggtggcgtaacgagcaaaggcctcaatgtgagagatcggaagtgcattagtgggcgcccggagtgtagaaaggacagatgagcatatcatcaccgcatcagcgagatcggaggttgcattatgcaatgcgtgccctcggcgaatcagcgaacgcgtattaacgtgtacaccgcgcactatgtcctgggcgtgagtgataaactgctctgtgtcgcgcatgccctccagtgagaccggcgcatattcgtccgcgatagtctctgtgagcacggcagccttgcggtacgatcgatctgcaaccatctcaggctgaagttctggaacgaggaagaactcccacagcatttcgtgagttgaaaaggttggatgagcgaggagcgtcttaaggaaccgatccagcctttcctggagatcatggagcacagaccgtgatggcttcgagtggatctggaatggattccggaaatccgagagagatggcatgtaagatgccggatgctccactgcaagccatttagccaaattctcaaagtcggagaaattacggcgacaggtcgtaacggtgtatgttgtcgatccgggtcgcgacgatgccacggattcggtgggaggaaatggcgcgcctgatttgagaatgaatcgcacggttgcgtcctcgacgaagtacgatcgcacgaccgttgtgacccgacccgaaggatctccgcaagccgatggaggatgggacaacaagatcaaatcatcgatgcgattccgcacctcatcatccttggctaattccaccgcagtcaaaccacgggcttctttaatatgaacgtcgactcttgggtctaagaagagaatgcggacttgatcaactcgcccgtacttgctggccatcatcaacggtgtaaatctcttgtcgttggtcgcgttgggatcgcaatcgctgtcctgcaatatgcgcctggtgatatcagggtcaccaacaatatgcagcagtgtgttccccttcatatcgacatgatcatcaagctgaagcggtttattgtcgccctgtgcccattgcgctgcagtcaaagcggcttggaccattgatttgtattctggatgatcatacgaccgacagagtgcaaagagcggggtttgtccatgtttgtctcgttgtcgccatgggataatgctgccaagtctctctagtagcgagggtgtgctgaaaagataatgagcaacggtgcgaccgtgaacgtcggatttggtcaaataggacgcaaccacgcttatatctgtctttgcaaataggaagtccagaaggatcttaactatctcggtgtgtgcgagttgcaccgcagcgtttaataacgtggtcccatcggtattggtgtcttgaatgatttcttccaaggggtagtattcttctagagtcaacaggtacttcaaagcctcggtctgacgggcctctactgccatcatcggtatggaatgaccagcaggatcttgggtttttgtcaaggtctcaatcgaattgtcaccttcaattccactggccatggatccgagggttgcagtcctggagatgaatgagacggctgatgactccgatagactgcgaacgtccattgaaaccttcttaactggacggtgcgggtgagattcttgtataatcgagagatcatcccaagtttggaatgggaaaacatgggacagcggtggtgcctccacaacagcttcatccaggtatgagtcgccattcgtatgactcgtgtaagagtgatcaagagggagatcatctggctcgtcagcttcatctgtctggaacagtacagactttcgccccggttccggtggactcgtgtcatctattgcgccatgatcctcgttcggttccagtatagatttcatatccgatattctgcccgcttttgttgcttgccacaaacgtctgttccgagcgctggcacgacgtaatccggcggaatcggtgacgagatacatcaaaacagcttcaaatgtacttagagcataccccatctcgccattatcaacgtcgtcgatgtaaataaaatgctgcatatacaacagtcgagcttggagatgccgtgtttgagaacgaatgacaacaataagcaacaacgagactaagacatcggcgttgatcgtgacagaggaagttcccttctcagatggcgagccgtccagttgatcataacttcccgggaaggagataaccttgactgttccaaggagagtattcagcatatcatggggacatcgagcgtcattaatcttccgaaattcttccacagctcgcccaagtcggcgaatcagttctcgcttcccttcacgtccaccttcaacagagattccgacttgggatacatcgatgctctccatctggcgaatgcgggaatccagctctgtgtcctctggttggcggaatgaacacagacgagggaaaagcagcggctcgtgaacttgctcggcgacataacgttctatcagccgctccactagaggaccggtgaggtcagtggttgcaccaagcaacgataattgctgcttgtcaacgaggcggaaaagatcaatggcagcagtcaccgcggtttctaagctccggcgcatgagatcttcgtcgtcctcgaagtactcctcagaattgaatggcaatcgccctctgctgcgtgatgaccagctgcggatagaagagctttcgtctgtaaaagactcgacgcgggacaacttgtggacacgttcactgccggatgcagatggcgaccgagaaggtggaggtggcaatggtttaccaagttcttttccaaactctttgaataatcgttccaggcccggatgcatctgtctcgcaatcatcgggtaattggctagcagttccccgaaagatttgatctcttgttttggtggtgtcccaattgaatctccgtttccatacctcctatctggtgtagtctgtccgaccacgctggcgccgcttccagggactacggctggtatgatcttcgcagggtcatatgttccgatcaacgggcgagagatgtagtaaatcagccatgggcgcgattcgttggacgggttgtaatatagcacgtcggaaagcagttgggcttgtgtgagtgacttgaatcctgatagagatgatctctgttagctaacatatatgggcgagtgcattcaccagcaagtgctctcacccttgttgctgtatactgagttgtccttgatgatcaccgtccggccattaaacgtggtcacctgctttgctttgcctctgttttctcgcatattgctctcttctttcgaattcgcagagacagtgtggattgggatgcggagcacatggctccctaaaaattcctctgacgcgcaaagatcggaatatagcaggttcgactcccggtcgcgtgaaccgatgagagactctgtcgttggaactagcaagacctaaggcgtacacacaagatcaattagccactccggatgatccgccgacatatgcacagcttccacctacatgattctcaaccggtacacactggcccgggacagtgcttcgaaagaaggcacggaggaaagggtttagagggtgcatccaaacggttttggacggcccagtcgaaagactccagcaatcatcaagccgtccgtctcaaatctccgaagcaggggatatgtgcgccgtaagatttcgcggggaaggacagctcgcatccaacaggcagcggcgcagtatgaagccagagcgggtcgttgaattaagtggacagagctgcaaataagctcgaacaaaagcacaatgctagatcgcagaaaacaagaagccacaaatataagagttgacgcagaagcacatgtgtcgcgggtaaatccagaacgtgatcgacaagttgatgggcgctatactgcattgggtaattatttcattcaataaactgcaacctcgggttcctcttgcgtagcttcggagatttcctaattccataagatatttcatcatggcagaaatcatgcatcgggttcaatctccatttacagagaggtgttgcaagtggagtttgtgtagtcctgtcatgagatttctaatatacagagaatagatggcgacaagcatgccattagataaaaacacaaaaagcacagccggtctctccacacaatgcaattcagtacacttgtgctgcacacaagcagccaacccaaaataaaaacatagtctctcctgtggagggagatcaacccagtctacgcacgtgtctgctgcgagtaccaccgaacttcagacgagtcgagtcggtcactcgcgcaacaagcccccgaatgtgtcgtccttcgtggcccagcaggacctttgtaaatgcatcgcggccctttccgaacccacggtacacgacctccaaccgctcgatctccatcaggaagcccttttcctgaatctgattcataacatgagcagacagttggtatgccgggtcaaagccggagcgaccagctttacggaaacctatttgaccgcatccgatagacataagagggctcccgttcggtcgagtcaaggtgaggattgtgttgtgcttgtggcagtagacgtgcaggtggtggggaggagctcggtcggcgtaggggttcttgaccatgtcggcttcgaggctttcagccatcctggagtagtcagagctaccgcgcgaggatagggctggcttcttgccctgcatcatttgggtgattgcagaaagcggcgacgaggaatctgaaggtgactcgggttctcgcttcagaatctgtttctcaatgacgctaccttcactgcgcgcagaaaacgccgtgctttggtgggagaataaacgtgtggtgctcaaggaggagattcgcgggtgagattggcggcatactgatggcaatgccttggtcaacttgctcatcgaaaaggagctcatcgtggtacagcgacaaaggacgaatacgagatgagggaaagagcgatgggttatagaaagccggatcaattgaacaccaatcaccaatccaatgtgttgaaatggccacaaagcgcgggtggtgtagagccgttgccggaccgaagggaaacgctggaagtttttcgaagtcttggcatctgcactttttcccttcccggagatctttacctctctccccatcaccttcttcatatcgcgtccaggctgggctggaatccatcttgcctctaccctcatatttaattctatttgttctcctatcccttcaacgctccagaggatgattccggctaggatgtctgcggcacgagccgtttccttgcggtcccaagcaccgtctctcagagtatcatctcaccggttgtctcgcgccggatcatattcaaccgtctcagctcaagcattcgcgcactctcttaaaagccaccgtgctgtcctacaatccccttcccaccccatccctcaacttgtttcgccgttcgccgctctccctttgacgcggtctttccacgccgcaacctctctttggcaacagcagaagcaacaggaaaaaaagcagggtgaggaagagaaggctgaatcacagggcgaggagtctaaggaagagaaaaaagagaagcaggaagagaaggttccgccaccaccccacggagacaagtctccttggcaggtattccgtgagactctgcagaccgagttcaaggcctccaaggaatgggaggaatctactaaagcgctggcatcctcagctcaccaatttactgaaaatgagagcgtcaggcgtgcgcgcgctgcttacgaggctgcgtcaagcgccacaacctctaaaacttccacagccattaagacgaccggtcaagtcattggaaagggagctgcttggacatggaacaccagtgttgtgaagggcgttcggaagggtgtcaacgcaaccggagagaccctcgagaaggccacaagacctgttcgagaaaccgaagcatacaagagtgtgaaggacgccatcgatgatggcagcagctcacgctacggtggttgggtcgagaaggaggaacgtcgcaagcagcgacagcgtcgagaggagcaagagctcaaggctggaaagtctctccacgttgaggagagagttgaagatcccaagtaagtttagatgatgacaagggttcaatctggcgttcctgactcatttatctccagtgccggtaccaacgtcactcttcacaaagattctgcctggaaagattcctggagagacttcaaggactccaaccccatgatgcagaagctcttctcgatcaaggaaaactacaacgagtccgagaaccccctgatcagcacagcacgcagcatttccgatcgcgttgctggtttcttcgccgaaaacgagaccgccatggtcatcaagaagttccgggagattgaccccaacttccagatggagcctttcttgcgcgagatgcgtgactacatgttgccagaagtcctcgacgcttatgtgaagggagatattgagacactcaagctctggctttcagatgctcagttccacgtctacgctgctctcgcaaagcaatacaccactgccggactcaagtcggatggtcgtattttagatatccgtggcgtggatatttctcacgcccgtatcttggacccaggcgacattcctgtgttcgtcgttacttgtcgcacccaggaggttcacgtttaccgcaagatcaagacgggtgaactagccgctggtacggatgacaaggtgcaactggtcacctacgccattggattgactcgtatccctgatgaagtcaacaaccccgaaactcggggctggagattgatcgagctgcagaaggctgcccgtgactacatctaagggcgcaatctgtacctctccattctatactgccacatttttctctatcatattgtcggcatatttcttcgtggacctcaccccttctgcatcttgacttccactccaccccctttcgactgtacaatacaactgtttggtattaagccaggtagatcctggctcctattacggttatgcctgttccagtgactgccaatttgggccttcgctggttaatcggattttttttcttcatgtattaatgcttcgtccggtctgacattttgccccaagtcttacttactccgaggacttacggctcagtccgctcaaatctgaatgttccatctttcccatagactagggtgcgttggattttatctgaaggcatttctctgggtctcgaggtgttctgctggcgtctgtgcattttattttcactctcccctcgccaccgtgtatgactgcattgggttgttggttttggtttctgttggggccgtaatcggtcaccaagatatgaaaattcttgaaaatcgtgtaaatatataaacagacatttctagcttgatgattttgatatcttgtagttctctctcgagtaccagctacccgtagtactccttccatgaacgtaaacgagctaaagccgtcatttatatagtggacccaactctcaatccgtaatactgaccaacccgaatgaatgccatgctaaagttgtatgttggtgaaatagatttcctacgtacctgtacccgggaaattacttcaaacccagtataaatggaggaattcttgaggattgctttcaatcgacatttgaccgaagtaaaaatggcggttgagggtggatctacgtggacatgagcaagagaaaaggaagtgagtttttttttctttctaaaaaaacgctttgaaaagtgaatttgctacatggtatatcagattgcgtctgtcaatttctcaatcgtcggaccggaaatttagtgcgggccttcagagccagtaccagcaccggcaccagcgccagcgccaccaccacccatcatattccgagccctgtgagctagatgtcagtaatgtgatttcagaaaccctggtatttcataaacttacatatttgcgaggttggggtcgctcatcaggctggacatgtcaggcatgccgccaccctggccaaagctttcagccatctggcggaggcggggattgctcatcaggttgccgagcatatcggggttgctcatgagattttgcgccatggtggagaacatcgggttgctcatcagggaacccaagtcgggcatgccaccagcaccaccagcgccgcctccaccaagcatgctggccagggaagacaggtcaggcatgccaccaggaccaccacgcgaggcacccggagcagtgtccagttcctcggacgggggctcggtggttcgggtggtctcctcaagcttccgtgtcgatgtctccaagccacgcttcatggcctcactaccgccgttgccttccgcctcaatgcccttctcatatgcctccttggcggcatggtagtctcccatatcgaagcgagcaagacccagacggctccacgccttggagtatttgggatcggcggcagcagcaacctctgcatcactcgcggccttctcatgctggcctgaagcggaaaatgcggcggcgcggttggagagatagatggggttggccggggcaatctcgagagccttggtgtattgctcaatggcaccggcgtagtccttcttagccatgagagcattaccctcggacttcagcttatcggattccggtgtgggcacaccggccttaggcttctcttcctgggaattttgagctcctgcggtcgattgcggggtcgacttgttgcgcaacttttcgtagacgttgtagattccggccaacgattgtccacccacagcatccttcacagcagcctcgtcggtagggtcaactttgaaggtatccgcgatacaagactgggcgatttcaatagactcggcatcatcggcggtgagggtaccatctttcaggctggagccgaggaaatcgatgatggccaaagccaagcgcttgttgctttctgttggagcctatcatgaatcagtaccatgaaacaaccaccacaggcgagaagcttaccattatagcaatatttcaataaataatgcgaatcaaagataaacagcgttcaggagtgatcaagatggaagaaaaaacaggcgaggcaatgcggggggaaagcttttgcacgtgatcgtagcttatcgtttccccggtctggttccatgcctggactctatttcttaacatttgaatttgtgctttgggggttcttgtctgctttgctgacggagaattggttccttggagatgactccatgtgagcttcattatccatcttaacccctgaaactgacctgagccatgtactggcctcatggagttcccagggtctacgcggtcaatggacccgatattgcctatacctcctctgatgaggatcgcgaactcctgaatacttcttcaaccaatgatggcaatgcctttgacgatggcgcggaaataagagagagcgacggtcaacatgagtccgcggagacccagccccatgagtcgcaaacaaagtcctccctggacactggcaaatcagaatggggagacgaagctattagaggcatttgtgtttctcggtctgggcagatgtttgccacaatgtcagagtcatcaattgctctttggcagacacgggtatgtgcacaatgccgttatagtccatgggggaagtttgggctggtgactgacaattctggcagcctacagcagtagttacagcaatctctcgatctcagttctcgttgaaaacatatggtccgaatgtttcactccttatgcacccaaattcgacgatcctggttgtacagaccctcaacgggtacctgctcacgtactcggtgacttccgattcgacaacccaagtctaccagcagcgattcgatcattccacaaacccccgtcgacaacaattggcccggttttcagcagttgaagaggccaatgtggttggggacatcaacattcgtttccgaatggctatcaagatcgagtcgggaatcgtcaaggcgctggcgctagatcaagaacttgttgtcgccaccgtgaaacctccagctatacaatgcattcggtggacacccgaggcgggaggagcacaaaccacatccgaactactgagtcgtatcctagggatctcgaagaaggtctcgatcgtggacatggtttacgatcgtgcgatgaatctcctcatttggattaccagcagtggccagacatatgccgtgcaacgagattcaggctcacagcaggatcctgaagcagcaaagaaactcttccacggacattgcttccatgatccgaaggatgacagcgaaaaggccgtgaaagttactgtaaatgcacgcttctctctgttgactgtgagctgttcaaacggtgatatcttagtttacaccgcaaaggattacatgggcaacattccactttcacaaaagctccatctaccagcgtcgcccacaaccactggggctttgactttcatgagctattctccggatggatattgtctctttgctggtttcgaaaacggctggacaacatggagtgtttttgggaagccaggaggaaacagcttttccgtagacactacgttggcgaccgccaattcggaggattggttaactggtgtgtcagacgggtgttggattggcggcgggtcggacatcattctgtctggacaaaacgaccgtcgcctgtgggtcctggagacagctcgcagtgctttgactggttgtttttcgtctgcaaacttggcccgaggcctactgcagaccggtactgagtttatcctctaccgcggtcatgatcttccagatctcatgacaatatcaggaaaggattcattgtggcatcatggccagtatccaccggcatatcttcattcacagtggccgattcgatcttgcgtcgtgtctcaggatggacggtatgtggcaattgcaggacggcgtggcctcgcacattacagtgtcaatagcggccgatggaaggtattcgaggattcaaaagccgagagctccttcgctgtgcgaggaggtatgtgttggtatggccacatactgatcgcagcggtggaaagtgacgggtcatacgaggtactacatatctccccctgttttggtgcatgactgatttgaattgaaagattcgtctttattcgcgcgaggcttctctcggtaacaattcgattatgttcatcgaatatctcccatcaccagttgtgttcattggaacctctggggaagattctctcttggtttatacatacgataacattctgtaccattatatcattaattcgacacaacctcaaatcactcttgtccctgttggacagattgctttccatggaattgttcgggcgccctctcgcgtccgatcgatcagctgggtattgcccgaggagcagatgcgtgagttaacttgtttttatgcagttgttcgagcacaacactgacagcaaagcaggaaacggtgatccatctcaagatgtgaaggtcgcatctgtgcttcttcttgtggacggcaatttggtattgttgcagcccacggtctcagatgccggtgacctcaaatacgacatgcgcgtcatatcccatgatgtcgagtattatatcttgatgcgcgaccaaatctccttcaacttttccttgcaggttgatgaatccctacctgctagtccttcggttgatatagcactagagccacctcatagtagtctgtcgctcagggactctctttggatgttccgtggtcaaaacctgcttgcttggaatgatgttcaagatgtattgcgggaggagatggtgccggcaccactcgacatccccctggacttttatccattgtctgtgttgctgaacaaaggaattgtgctcggtgttgaatcggaaatgatgcaacgtcgcgatgtgaccttcactgtcctgaaatttgccattcgggtaagttgttttctctatcgataacaatttgtactgacatatgcacctcagacacacctcttcttaccatatttccttcaatatggcctggcgagtgtcggaacgcccgcggctctcgctctctgtcgccatttttcacatttgtcttacttcgctcatggattggaaattctactccaccacgtgctagacgacgaagtggataatgagagccgagcgaataaaagtgacaatccccaagcacgagcagaaccactactcccaactgtcattgctttccttcaagcctcgcttcccgccagggattaccttgagattgttgtacaatgcacacgaaaaacggagcttcgctcatggcgcacactgttcacttacctgcctccacccaaggatctttttgaacaggctttgaaactcgactccctcaaaactgctgttggatacctccttgtgctgcaagccttcgaggatgaagagcatgggcatgatggccgcattgaagaatatgttgttcgtttgattgctctcgcctcccataagggagactgggagctgtgtgctgagctagcccgcttcctcattgcgctggatgcttcgggtgagatgctccggcgcgcaatttcccgagttggtctacgacccaactcgcagccttctgccaaaggcacatttcccaactcggcaccccgattcggtcccgcaggtgttcaaggtcttggcttgaacctcccaatgaggtcgccatcatgggcgtccctttctccaacatcgtctctttcgcctcttcccagccggcaagatggtgatgtgttagatgaagattgatattcagcgcatgggcaagatagataattaaggtgttgatagaacaatcagataataattgaacaacaatctcttggttgcttggtgacaaaagataagccattaccgagatgactcgagaccttgcaaattcgcgagagccacctcggttatgacaatatataccagactctttgaataggaaatatgatattcatttgatagaaagcactatcacgatgcaaggtgcttacagatatatcctataataatctcctgatgcctgccctggtaattttccttcctgtctgactttgaccaacagcacacaggttacaacccaggaactgctcgcctgcttcccgagtgagggcttttaaattcgttcgcatttgcctgaattgcatcttcttttctccgtagacatattgcaatctccattagaggaacaggagtcacctgggcatttatgttggcgtcgagttgatacatggccattcgtgtttgccactaggtaattgatatcaacaacttcgcacttgagactctccacttgaccgccgacataggcttttgggtgtttatccgatttagatgccttgaacatgtaagaatgggagcgatcgaaaacaaccaattcactttcgcatctttcaccactgactcgaataattaacatcaatcatagagaataaaactggatttataacctacccgtaaagtgtgcatatctttttcttgcctgatggcgcttcacaggggatatatacggacccgacgttgcgatgactagcagagattattagcccaggacaaggacaaccagtcatgcacgtactactctttgtcaagtttttgacatgtcccgtcaagatttaggtccatactgtgaccctggaagccctgggtcgtgtagacacggggcttcgggcaaatatcagtctggccaaaagccaccaacggatgaaacaccagagcaaaggctatgacactgcagactagcatgaccgaagataaaaattagagctccaggagataaatagagttgtgaaaagcatattggcaagtagaaatatacatcatgcctcaaggccgggtgtaagtccgggttgacgggggtcttgcgtaagggctactcctactaaaataacccgaagacagctctgaggttaattatcctagttgctgagctcattattctctattactattatatatagtaccaattttaagaagaaggatgtaacctgtacattaggcatcaattattgaccagaagagacaatcagaaaaacttcacttaacataatcaacccatttatgttgatgcaatagcaaacagaacttctactgcgatcagaaaggatttatcaaaatcgtagcactattagccaaatatatcaagccatcgaacggaggctctattcctaacacctccatgtcaaataattagctcgaaactacaagagttacctaataaagaactattcacagccacaaaaatttatgcagtggtgtcaagcagttagcatacggatagcctcgatatcaaatcgcaggtgtatctcgtactcacggccgatagtgtgaattctagcaatccgacgggtacctctctcccaagctccgagcacaacgcatgccgctgccttacctagctgtgtacctagaagctctcgatactcctcggtaccatactcccatgcgtgactctcaagacgatcacgcgtaggccaatccaaatcatgtctcgggtagaggatttcctgcacatagggcagggtctcttcattcacgatattagtaaaataaagatatttgagagtatcgatggggtggtcaaaactatattgagcgatagcgacattggaccaatgaggccccgtgtacctgtaaatacattcagcaattagagcgccttttgcgaagctatgttgatactgggtttcctttttgtcgccatccttgttatagccatagtggaacagtcgtgtgaagcggtattttttgtttgttattgggagtcctaggtttttcaagtcatccctgatggatttaggtgggtcatcaaaatggttcactggacatgtaaatctttctctcttattgctgttattgaacagatcgaacaatgtctgtctcgcttgcccacaatggcagccgcctagagttgggttggcaatccatgcttggtatgcagctcctttttcatggaacccacagacttcatcgtccgacagtgggggcttttcatcacctaaagggctattgaacgcaattggagtcattccattactcgatgtactgctatcatcgggaatgggatacaggagaggagatgctgaaggttctgcgattccttgcgaaagtactggggactccggggatttgggattcagacgccgccgagttggggagcgagaagaatcactgtcatcatcgtggctgcgcccccgtttgtgtagatttggcttatgtggtttagttggtctgcgtagccctgctggtcgatatgccattttacagtcccgcggtttgttttgtgttgtgcagaaaagatagacaattcgggtgccgttatattttgtagagatattatctcagatgaatacttgtaatgagcaaacgagaaacaatatgcttatatagtgctgatgagttggccttcataatatgttggatggggctattgaaagaagaaagaaacaagccctcgacagaaatagaacacccaagagctcacccaagtcatgaatataccaagacgtcagaagattgtatgtacaaagagagtagatacccgcgacaaagagcacaaaaataaattcacaaagagttcgaggcaaaacaaagcgaaacaaattgctttgttgggacaatactattctaagctataggctatattaacccccaagctatgggtgagatgcttgtaataataggtgcggtctatgattgacacaaaattattctgagagattaattttagaatagatgccctatagagcgagtgagatagatacaggttatgaagtgcagtgccggatgtggtaattgaccaacttgagcatcaagaacaagcgtccgaaacagctagttccaatagaaacaatcaaattatatcacaagacaagatggatatccttccagcctaactcttgagagatgcactcgtattcgcatattcggttgaaatactgcgacatatgttggcttaggtaaacctggaactgcttggaggttgctgtgtacaaaatcactgttgtccctgtagcaatcctgggcaatatccgatatcccacttccaccctccctctttgacaagatatctcgcccgtattcatatcttactgctagtaagatggaacatgcactgctcgcagtcctgtaaatatctcccggctacgtgtgcctccttcttgtcctgtgccagtcgccctgatgtcgctgaacccggccccgagctcacgcccgagccagcagccgccccacaccaacgctgcatcgagatgttctccgactcggctcattcgcgccaggtcgtcggtcaagataacagctcccattccatttgaattgttattgcacaacttgactgctttctcttctgtatcaaatggcaagacagtggccacaggcccaaagatttcctcctgtaccacgggactatcagtgcgcacgctgctcaagactttagggctgatctagaaaccatcctccgggacatcatcggggatcctgccaatctcaaacctggcatgttcttcaccagcctgtaccaagtgagatcgaatcttggaataatgctccccgaacacaatcggaccgagttccttgtccaacccgtagttactgtgaacatatcgggtaaacttgagcagaaacatcctgtaaatcgatttatggacgaaaattcgagagccgcctagacagagttgtccgctgttctcaaatgccgcgtaggctgccgcagagaccgcctcatcgacatcgacatcgccaaagactagtattggactactgcctcggatctcgagagacatgtgcttgtgaatgtcagccgccgtgtccttccgaatctgaattccggtttcgatcgccccacagaacgaaactccttttacaagcggcgagcctataagagtggaaccagtgtcggttccatttccgaaaacaatgttcataacaccgggtggtagctctgcttgccgaagaacttcgccgaacactatcttcagggttagtgcgttcatgtaagttcgtcaaataagataatctcttacaaaaggccgtcatgctagtcagttcgctcggcttagccacacctgtgcagccaaatgcgagacagggggcgattttggacgtcaagaggaaaagcggcatgtttgatgaagtgacaatggcgtagacccccactgggactcggtgctcgtgcgtgagagtcgaatctcctgtgcctttgttgagatgtaccacactttcgtcgtgaagaatgtattttgcaaaatatctaacaggaagaaaagttagagtcggtcatatacatcagacgagtggacggaccggaaatgctcaattgaacgatcaacttcagaccgagcccgaaagagagttttgccttggtcaatactctcccatactgtaaacatatctttcttttcctccagaatcgacgcaactcggagtagaagatcagaccgctcgtggggtgtggtctgtgaccatgctgggaaagctcgagacgcgacatttatagcgtagtcgacgacgtttgggggactgagaggcactttcagcaagagtttgcctgagcgaggggaaggtgaatctatccattccggtgtgtgtgcacaatcaaggaactggttttcgatgaaattctgaagctgaaggggctcattcgtggagttagtgaggtggtccgaagctcgcaccagggtatcgagctgccacaacgtagaaattgtgttcatgattgctataattgtagtgagagaggaattgaaggcagtcctatgcttgggatagtgaggctgagatcagggtaatgtgtgtgatacttcctggactcaaagataataccttgtgctgcggatgttgatgttattaggatgagacgcgtcgaggaagatgaccataatgattataacaagttcgcctgtttattacaccacttccacccactcagtgagagatccaaagattaaccaaaacatatatgagatgatacctcactatatggcttcttaattggctgatttgagtatatgaaaacatcttctataatattagaaactcggtagttctttcattctgctatcagaggcagaatgaatatcaaagcgtttagcagatcactgaagcttcaaaccaacatggtacatggtccccgaggtcttgcttcctaacacactgaaagggaaggcccgagaattaagccatattgcattgctcaacctcgcaaacttgtgtatggctgcatatagacgaagctgagtacatgcctgtgatctatacatgaaataacacgtgatgtggacccactttccccttcgggagtatatagggcacaggaggtatcacccctttcatcttttttttgattttcaccgatcaactccctcctgcttttgtcgtcttgtagagcagcagaacatattatgtacattaattataactaatactaaccaagtacatactaagtgttgatgatctgcaggcataaacgttatattcaggcatcaacatgtgagggcccaccttccattttcggaagcatctattcccatatatttcacagcaacaccttccccctaaccgagagtcccccagtggctgagtgggctcgcatgcatgtacttggtcaatccagctgcctgcgttcgacctgctcagtccacaatcctaaactttccaattatgcacccccaaccgtcttcttcccaccgcaggtccaggaaccagttctgccagcaggcaggaattgaggatcttggggtcgaacagattgtcagagagctttatgggccaccaaaattggtacattggttgggcagtggccaccactggctgggactctcattttttgggtgttttttttgttttccttcccctttctattttcctctcttgtcttgttagcgttttccacacaagataataggaacccccttgacccgaaggaatgattgcaaggcttcttggctactatgtagttgaaagataaattcactccatgtcagacaggtctgttaacccgtttccagccattcgagcattgtttctcaaatatagccgaggctctcaagctactattcatgcggccaagagcaagggtcatagacataggactgcctgctttgtcatagacaaagccaagagaattcacgtataattactcgggttgttcgattctttcactctttgagtctttgtcaatttattcaaacaaaaatgctgcacaatgccattaaccaggttctctttgttacttgtccgtattatttatgctcgcttcgagcatataagttcgctcgaggtaccctgttgtctaattggaccattggaccaattatatcccgcaatggcttttaagtatccccagtttgagccgtatggagacaagctaatccgatggatggaaaatgccaacgaacccgggtgcccagtttctatgactacacttaagtcacagaatcttccaaagtcgccggactggaacatcgagtacgaaagagaatggttatcaccagatcgtattgcctctattgtgggtcttggtctgcgagttggagagctaattccaaacgacttatatcccacagagtccccatgtctacggcattcaatcatcaaggcccgtcgtaatggaatcacagccttggtggggacaattgcaccaggagtactttttgtttattctattaggagataccacgagtcgaacgatccgtatatatcagatcttgccaagattgcctatggaacacatttttcgctggatagtttgaaatatatcttcatgaacgacgtgcaggaatctgcaactgaaccatttatcgaggaacagatctatccatctcgtgcgggaataaagtatccatctgcagagagtcaaacctgggactatccttcgccggagtttagagctattatgggtacccctatcggtaaagttgtcggatacttcattctaggtgcgtttggtcaaggtgtaaaacgggttgcacgaattgtcacttttcagactggtcttgaccttcacaaattggaaattcgttttgatattgaagatgttcgaggaaatctttctttgggggaatttgatttagatataatatcataagagggagatagagtggggacactaatcaattttatattataggcgtatcagaatcttagattggggtagccctcaatcttctagcagtttattgtaggctaataacgatattggctaaaaggatatcaagtgataaccaatagtcaacacactgcatccattactccgcataggtgagggcgcagggccaagccactcacgggactcggcccgggccgcgttggccttttcggtatcaaagtggggatgtctgagaggagaccaagtcggagatgactggtctgtacggctgtggggccaaggaaggaggtttgtgggtgctaggactgaggtcaaacctagcttgtttgatggttcgttactagactttaattcattgaatggtctttccacatcatgaaaactaaatacatatgcagtgtcatgatcaatatatgctaagaccagttctaacgctcgttacttaattcgcagccccattctcccgttcctttaacgcttgacgaactttgggaatcacgaaccgtccataatcaatagcgtcgttgagattgtcatagcctcggatagagatgaggtcggcaccaagatcaacatagtcaagaagcgactcgacaatagtcttgggcgatccaaccagggcagtggatgcaccacgtgcattcgttgcagtaacagtaggataccaaagagcgcggtcctggacttctccgcgagcggcaatatcaagaagccgctgagagccggcgttctgtgggggcggcgcattggcggggaccttgccttgtcctttcgctcggttggtagtcagtgcatcgagggtttggtgtgctttcgcccaggcgaggtcgtcagtctcggcaagaataggacggaaggtcacccagatgcgaggtctgtctgagtccgggcgaccggcctttgctgcctctccatagatgcgatcaatctggtcctttgtttctttcaaaggttcaccccacagtccgaatatgtcagccagggagcctccaatacggtatgcttcgtccgatgaaccgccgactgagacaggaattgtgccgttagtcggccgaacgcggttgctgaattgtttgaaggtatagtatttgctctcccagtcaaatggctcatcggatttccatgcgcggcggagaatttgaatgtattcctcaaggcgtccgtaacgttcatccttagtcaggaagtctccttccttagcctgttctgcatcgctaccacctgcgataaagtgaacaacgacgcgaccggagctaagttggtccagtgtagctagcgcctttgccgcaactgtggggtaaagagtattgggtcgcagagcaatgatgaccttgatgtttttggtcaccgacagaatggtggctccaatggtgaatggatcataggatgaggagtcgtagggcaccagcgtgtagttgtaagcatagtcatcaaggttgcgagcgtagcgaacgagatattcaggatcaatcgaagcgttgggaattggatggatctcggtagatgcgttcgggaacgtgacgctgatgaattccggcatggtgactgcttttttctgccttttgacgttcttaattttcttgtcaggtactattttacttctcattcgtggtagaccgatcttcttttaatacttcgtagtatctccgagttgatttggcatcaacgcatgacgcaagatggtaagatattgcgtcttagcacgcaagtcgataaccatatcgttccacaccggatcagatgttttggattttcctaattcaagtaagcgttacttcttcggctgcattcagtgaggactagtacgaggaccagaaggtattgcgccagtattgcgcaagatcgaccatgggaatcgcaatatgaagttgactagcacccaggtaagcctatagaaaactagccgagatcgcagttcaatttccgctgacttctccagatcttcaatctcttgataacgagttgcagggatgtccatttatgacacattgatcactgagataatatgcgtcgtgatgtggtgccggtacagactcatgccaggctagcttctgcctttaacgctagttgccggcgggttaatctatatccagggcctccataaagtgcaaaggtcataacaaggttggtcgttctgctcaggttccttcggcagagcgtacaatatatatcccgagatctcagactctcggggttcatcccaaatgcaagcgagacgtgtcctttaaggagttatcgtggctatcacgcgcaatttctactccaaggcagtattctgtggttttttcctgtgagcctcagctgagtgcaaacaatcaatggctgaagttatagttggaccagcgctccggccaaagacccggcagcttggttaattcgagaccactcgcctgttgctctgattgagcttgcattcgatttccacgcaatagaggtcaggccatcggtatacctctccaagaccgtcatatgtgatataccctgtcagacttggttggagtgcgttgttgacgccttgggccggtccaccagcccaagtgggcaccccatccgccgtcagatcatgactcagcattcaggtccggtcgcacgtgccacattcaatgcgagtccctataggatctatcgaatacatagaggaagattggtttgaatcttgaaattcatccagcttgacatcattaccaggttcaaaccaataaggaaagcgacaacctgttgagaggcgcgtgatgataagacgctagtctaaatcgggatactacgtcatcgatgagggatgggttatatccgcgacatacctcactccatcgtgtttcgtttacacatgtttcccatttgaacaaatctactacattgaaccatccaccatgccactcgttgtcccaggaatcaacagctcatttggcgataagtccgagtgggtcaacaagctgatgggcaagacgatcagcgacactactaatgagacagtacgtcacctttgagaaatcatcgaaatcaaatatgacattctaaccgttccatagtcttttgcaaagaaggatcttcctgaatctcaccgggtgttgaagccaggtgacgcgaagaccatggatcacaatccaaacaggtaaagcctcattgcaaagtgccgtgaagccaatgaccatgttgctgacggtgtacgattgaacatagacttaacatccttgttgatgatgctggagaggtgcatgatgtgaactacggttagagctaagatatatttactaagcctggtggctcaaatcacaagaacaaattgagccaattgaatatctattacttgaaagtctattgatgtcctcaaattagcatcttgtatgggctaactcactcggccttccatctgagtagagtaagggagtgtcgcgggaacacatattgtccacttccagtccaggtcgactcttggatcgccacttcttctttgccgttcagatttgtcacggacagatcgcccgcggtgaccgtgaacacagctacttctccctgggctccctcaacatgactttccaagtctcgggagtcgtgaatattcaccacagcaacattaacaaacccatcatctcctacagtggcacttacatctaaccacggcgtatccttggcacttcgaatccacttgggcgatgtctcaccctcgtatgttccacaggaaacatgactggccacggtccaaccacgcatatatcgtgaaaacagccaaagcggccaccaggtggtctgcttggtaattccctctggggtagtcatcaagggcgagatgacattcacggtctgcgcgatacacgccatgctaacatccttgctctttcggacaaagacattcaaccagacggccacggcgagcgcatcggagagcgtgtaattctcttcggcacctaggctcccctctgcgcggattggatcccacacgttccactcgtcgaagcagatcgtcgggcggagttgctcgggaggaactttgtttacaaccctggcaaggtcaatcaaagcggacgtaatttcaattgcgcgctcggcggcgagtggcgctgtcacgttgaggaggtgggatgatgaagacgtgtagagatggatgctgtgcatgtcaatcaaagggactgagctggttgacaatgcggagtgggcaggtacaagacactgatttagtgtgtagtaatcccacgaagcagtgccatcttggccgcagaggatcaatatcagggtgggatccaggagtttgagagctgtaagaaaatcatattagcgcgattgttctggtagtattgaaacgaagcattacctttagcccattggattgccttgtgagcatacgcttccttggtcatctgctcgacctgccaaggaccccaacactcgtttccgagggcccagtacttgacctgttcagggtgttagatcgttgcagctgaaaattttgcacttattacatacattgtagggctcctcacgaccgttctttcttcgtagattggcatagtaagtattgcccgttccattgcagtactcaacccaacccaaggctaatattgtccaacatcagcatgttgtatcaaagtcttaaataagaacgtaccctcatccaaggtaccggtaccaaagttgaagcaaaggtacggctccgtgcccagagcttcacaccattgcatgaactcgtcagtaccaaattggttcgtctcggtcccgagccaagcaagttctggtctttcgacagatcgacatcagcaaagttccaccaaagttaatgtgatatgagaacataccttgctggccgttggttcttaggaccaataccatcgagccagtgataggtcgcacaaaagttgccaccaggatatcgaacgacagggatgttgagccccttcaacgcctccaggacgtctttgcggaatcctttctcatctgacagtgggtttccagggtcatagattccaccgtagatacaccggcccatatgcctaagaactagtcagtttatgtcatgagactggaagaagttcaagatgccttactcggtaaagccggcgtaaatgtttgggttgatcttggagatgcgtctcgatgggtgcacagagataagaggcgtctcatgatcatccaatttggtaaaggtcgtcattgtttgcacaaatgattttgtttctactgtttgggttgaggcgtcacttctggctaaatatgcgatttagcttggatccaaggtcgcggttcactttagggaaaaggtatttgaaaggcacgattcaaggtagacaagtaagaagcagatgtatactgatcgcagataacctatcgaaataaccgagggttcaggccttgaagcggcaaaactcctgcgggggaactgtcgtgagatccggatgatgacccctgtattagccctagtagccctagcagcgtctggggtggctaccggaaacacgagacgaagcccttagttagctttctggatcaatgatagatcaacagaccaatgagtcgcagtctagctttaaaatgcccccggcatgagaggaaggtaggagatattccatcaatcacagacgagatcacgcgccacatttatttgccaattcctccccgcatgcttgcaactcgtcattccggaccatttctagcaaaggacaaaatatgagaagtgattggtgaagcagtttccgcattccccatgtttacaccacgcgatgttagcccagttcaagcctcgacttccccgagtatacgattctccgaagtcatggctaattgcatgggtttctctgtatatgtagagaagattccccggagaatttgtggcatgtggaggtagatcttcattccccatattcttcgatataatatccactctctaaaccatgcgtctctcgccgtcgtggtaccaggtatgaagggaccactgcattgagaagacggagctcatgctttgatatagttcctggtcggtgtctttgcctctcttggatcattcctttatggatgtatgtcaccaattccctacgtgacacgcggaatctaataaattcgcagatgatctgggtgtaatcgctgaggtgctcgtctgccaatcatttaaagccaaattcgaggcagatgatacccaaacgtcagtcccataacatatggaatatgggaatatctaacgactttgcagaggattagtcgtgtctttattcacggctggcgcatgcatcggtgccggacttgcgggcgccagtggtgatcatttaggtagacgacggaccatctcattgggatgtttcatcttcactctcggaggtggtcttcagaccggtgcgaggacaattgcctatctatacagcggacgattcctggccgggttagggtatgtgatttctctcaaaacagataccccaataagcactaatcagattaattcttagtgtcggtttcctcacaatgatgattcctctataccaagccgagatctgtcaccccagcatccgtggtcgagttacggccttgcagcaatttatgctcggtattggagcgctctgcgctacatggattggttatggaacatacaccggctttgcagaggataacaatgcgcaatggcaactgcctctcggtttgcaaattgcccctgctgtatttttgggtcttttgatctctttcttccctgaggtagggtctgatttccatcgggtgaactccaataactgatgtttatccagtcgcctcgatggcttattgaccacaaccgcaccgaagagggattgcgcacattggccaagttgcatgcgcatggtaacgaaaacgatgcttgggtccaggcagaattcgctcaaattcaggagagcatcacgtttgagcatgagaacgaggcgaagtcatatgtcgagttgttgaccaatcgctcctcgttccgtcggttgttcctctgctgtgcattgcaagcctcagtccagatgaccggtgtatccgccattcagtaagtgtacaatgacttaccactgccaagatatgtcagcatagaatcaatcagctaatatgatttcgtgcatagatactactcacctcagatttatggtcaaatcggtatctccaacgaagacaccctgaagtatcaggcaattaactctatcatcgcgttggtcggccagttcctgtgcatgatgttcattgatcgcttcggccgtcgctggactctgatcagcggcaatctcggcaacatggtgaccttcatcgttgcaaccatcctactcgcaaagttccctccatcgaccaacaacaacggtgcgcattggggtttcatcatcatgacttggctgtacaatttctccttctccgcaacctgtggtcctctgtcctggattatcccagccgaagtgttcgacactcgcacacgtgccaagggtgtctcgattgctaccatgctttcgtttgctttcaacacgatgatcggccaggtcacgcccattgcaatgacgaacattggctatcgttactatttcgtatttgtcatctgcaacttcaccaatgcgctcttcttctggcttttgcttccagagactaagcgcgttcctctcgaggaaatgaaccagatgttcacgaatgcgccatggatcgtgcccggaagtcgcaaagaagattatatgactcatgacctggagcggaaggttgaggagcaggaagtgaagcataatgcgttgcatgttgactagaataggaacaaggggaaggactgtaggggacatcgttggggttgcatgtgtggagagctcagttgtgatattgagatacaataatgaagttgttacccgtggagaaaaatgttcgtaaaatcgatcggccttgtaatatgtaagagaaggcactaaaatagatgacttgagaaggtcaacaaattggatatgagagatgatctatagatactaatgagaggccaagccatgccctcttattatacctgtagagacattgcttattcaatcattaatttgatctacatcatacaatgctaagatagattttgtgctaactcgaggtcattcatggatgttgttccatcattcagaatctgagctgtatcctgccaagccaagcgaaactgggactggttttgtcgggattttggactttatttgcccctcctctgtgtctgttaccaccttgggctgtgtggcagtatttgtggtttcgggtgatgtggcagaagcagcaggtgtggcttgatcggacttggaagtcccttgatccagcttcttggtacttgaaataccagatccaggctgtttctgcgagtctttcccattctgtgtgtccttctcagcagtaatctcggtgactgaagctttacgcttcttccctgcaatcaatgagttcttgtgtttatcgctccgtctcttgcgagccagtgcggtccattcttctccttgtatgggtgcctccgacgaggttgattcaagcaatgctttctgcgccttctcgcgctgtcggcggaaggattcaagttgttccgctgtctccctcttcacagcagcctcctgggcacgtgttgactcgagaacagaatccaggaagtcgacttcatcttcatccagggatcgaaactggtttttgagacgcgatttctcttcaaaggcttcttgtttggccactgtatgataaccgaggaaaatcaccctaacatgttagccagattcccggatgaattgtccactactcttctttgttcgcgcagacgggggccaggtatccgagttgggctcacttttattgcgctccagcacctcgaagagacttttgccctcatcctgcttccctatttcggccttccgtctccgctcctcctctagctcctgctgcactctaagccactcatcgtcccgctcgatcggcttctcatttgttccggatgaaacgaaacccgatgacatagtgatcgggctgggtaaatgggtcgttatggatcacgggatggagcactgggaatggtcggtcggaatgcgaaattatccggcgacgggggtaccgatatgggacgtggggtggaccgaaacacgggatgaaaataaaagagattcgagaagttcctagaaagttgaggtttcaggtaattgtgagacccggacagttcggagaattgcaagaattggaggggtggatcttaattggaagatgtggaccaatatgagttgcatttagccagaatgctgtctcttgccctgtcacggtggaactggatatagccagtcgggtaattcgtgatcacttcatccaaggacacccaatttgttgcgaatacgacagaaatcaagagagataacgtccaatatccttcgatctaaacccccactcccccctctctcatctcccccacgacatcatcgcttgctcttggacctgcccactttaaatctgcttaccatataaagccaaggtgcctcttgatagtctttttttaaaaaattcattcttgcggctttcaaaatacagcaaaatgtcgaaccaacacaccgagtgagtgccttacaatgcaatgcaatacgcctcccctccctagccattgcattaacgcttacctctctcttcaggaagacctataccctcaacactggcgccaagatccccgccatcggcctgggaacatggcagtccaagcctaatgaggtccgcgaggccgtgaagaacgcccttctcgccggttaccgccacattgacactgctctggcttacggcaacgaggctgaggtcggtgcgggtattaaggactccggcgtgccccgcgaccagatctggctcactaccaagctagacaacccctggcacaagcgcgtcactgagggcattgattcctctctcaaggaccttggcaccgattacgttgacctctacttgattcactggcccagctccaccgaccccgaagacctgtctaagcatctgcctgactgggacttcatcaagacctggtaagtgacaccaagcatccacttccaaggttagtggggaaccattgctgactcctcatgtctaccacaggcaagaaatgcagaagctgcccgccactggcaaggtccgcaacatcggtgtctctaactttggcatcaagaacatggagaagctcctgaatgaccccagctgtaagatcgtgcctgccgtcaaccagatcgagctgcaccccaacaacccatcccctaagctggtcgcctacaacacctctaagggtatccactccacgggttactcctgcctgggctcaaccaactctcccctgtacaaggatcccactctcctgcagattgcggagaagaagggcaagactcctcagcaggtacttctagtttggggtatccagaagggctggagtgtcattcccaagtccgtcagcaagtctcgtattgagggcaactttgacatcaatggttgggacttgactgccgatgaggtgagccaactcgataacctgaaggaccgcttcaaggtctgtggtgacgattggctccccgtcaaggtattctttggcgatgacgagtaaatatgtctaaaattatgaatgttttatgagtacataggctttagataccaaaagagtcttattgacacccaaaagctcaatattattggtgaaacttgcgagatttcagaatccactgcgatgtcgtcatagtaccaaacataacataccaagcaaactaggcaaacatagtcattttggtcacgccggtggcggggcacagccactgcggagcctcgggtctgaggcggagagataagggtgtatacccgtggaccccggcgtcatcaggcatccctcctgtcttctcagcatccattcccaccatctccatcaaactattcatcgctgagacatcaccatggcaccttcagcagggcacctgctgcttcctaaattttggagggcagcacggtatgtctccccttttctgtcgccatagcgagttacaatggatccattgactgacatcctcctaggttcgcctacgaaaaggcctccaaggctatacgtaacaaactgccagagcctacacagtattatccggtgcggtatcaacccgcctatgcccgaatcaaccctcgtcagccaatcagccgtgccgctgccattcgtcaagcccgtagtcgccacttctcgacccgtgctggtgccttcaccgctgcgattcgatccggactagggggcaataatgccgccccccggaacacctctcgcattgtgtctaatatcagccgactcagcagccgtgcacctttcgcttctacccttcgtcccaatctgaccggcggcacccttggccggactgcaggaggatacgctgctggagctggccgttttggtggagctagatacttttcccatggccctgctgccccagcacaagttattcagaatgtgtctcagggcgtccgtgctttctttctttctgggcagaaagttcgcttcgacggcatcgatccacgcaccggagagaagcggtataagtcagtcagcgcgctacaggatcaggcggaaagaaagatgaatgccaacctgcacaacgcacctggctcgtacattgacttccaagtttccccgaccatcactgcactcagtgccgttggtgctctcggtaaccaggaacgctcctcgtgcgactctctgaactccgagggcctgatggatctgctctctgccgattttgcccgtgctttgaaggatttctccgcggtaatgaacgacctgaagcgtctctcgtcacttggtgatctcccgatctcccttcacgaccgatcgactatacgggtgcgcttcccaggctgtgatgcagaaactgtagagcagctgtgttgcgaggtcgggattcagcgaggccgagtcgtgcaggatgaagatttcgatattcgcactggcgctgatttggctctcttgttcccttttgcaccgagcattgcctcttcgtccgacactgactattacttcgagaaagccccaaagttgcaatcgcagtatccaccggaccttgactggcaagggatgatgacaccagaaagctgcacgccatcgtcaccaagtggcagccgtgattcgggcaatgctatcagtttcgaggacagtgagctatttggtgctaatccatggatatcttcgaccaagagctactctagtattaacatcagtgagcttggagatcagcatttcttcccggaaatctccagctctggtcaacccgacagtaactctgcatatgaaggtattgagggaatttacacgttcctagctgagtgcgatcaagccaagcgttgacgaacacactcatattgggccatacttttctactattaatgttttttatctctcggggttttttccttttcctttttttttctttggtacatatctcaggctgagaccgggactatatacatgacgacgcagataccactccactctttaacacacttctttcagtgttacacttgctcaattgaatgaatcagattgaaacttgcttgttcgctttatgtcactggtggcctagtacatcgaggaccggtcagctatagaagcgattgatttctctcaatcctctttggcttttcaaaatagccctagaaatagccactcatgtcatttcagcctgcacaccttcgtccggcctcttggaccattacggcctaaatgattgtttcatataaagacaggccggctgaagaatgcgccacggtgcggggtccgggggatgtgaataatgtggcttgccgaaaggaaatggcgttttttcttggcttggacttttcattatgtcgatatgtcaggtctctggagtaatccgtattctattgcaatggattctcgaaattcttcctcctttgcctgggcgaaatcagcttgttttgacacccttcctgcttctgtttgtgattttgtcttagggaaggatccttatgcgctatgttagcagtcgatcacagacgagcagcttaaccttacaactggcgcaagcctaatatggtcctcccgcgccgagtctggggaggatcgacgatgagtgtctcgtttggggacgggggatcaattccgcgctgatgccgggagtttgatattacatcaaccttcctctccttgactatctaggcaattaatattagtttcaaggctacggactatttagtgcgatatgagctatgtgccatcgaacccggatgacacaggtttagccagatttaaccacgtgttagggcagaaattgcttgtatgccttctctgttatacatgtgtgtcttggcaatgtctggaaatggattgaacggagatagttctgatctcttatagaatagcttgatacaatgtagcgttggcttcgggtttccggtttcaatcccggcaaggccaacaaggcaatcttgctggggtatataaatttatcgaattctcccacaactgttaacaagatcacaggaaaacgagcaaaactcgaattcattgtttcaagatcatcaatatgcaatttcttcttcttccattcgtacctctgctggcttcttccgcagcggcagctgcaatatccagcgcagctagtccagctgtcaccgctgcagcttctggaaatcccttctcagggtaccagccttatgccaattcgtattatgcatcagaagtctcatcctcagccttgccatcaatgacgggggctgccaaagccgccgcaagtgcagccgctcaagttccgtcctttttctggctgtgagttcattgcactggtattatatatccctcgggcaaatactcagattgccttatagggatactgcagacaaggtaccaacaatgggcgagttcttggccgacatcagggccaaaaacaacgccggtgctagcccaccgattgctggccaattcgtcgtttacgacctgcctgatcgtgactgcgcagcattggctagcaatggagagtactctatcgcgaacggtggtgttgcgaattacaaggcgtacattgactctatccgcaatgtgttggtcgaatactctgatatccagactatccttgtcattggtgagtataccttgctgattgatggcttcccgcacggcaatagtgattgctgatattttttctagagcctgatggtctggctaatttggttaccaacatggctgtgtcgaagtgtgccaacgcacatgacgcatacttggagtgcaccaattatgccgtcacacaattgaacttggccaatgttgccatgtatcttgacgctggtaagcatctttcctcggtcctggaaggcgacaatccccttgcgacaagtaaaacagcgagaattatctttatttctgtttagccaaccgctcagttatgtcattttatgtggcgtcatgagaataatgcagccatctctcatctgtatatgcttactattaacataggacacgcgggatggcttggctggcctgctaatctgagcccagcagctgagctcttcgccaacgtctacaacactgccaataaacctgcagctctgcgcggacttgccaccaacgttgccaattacaatgcctggtctctctctacatgcccatcatacacctctggcgatgccaactgcgatgaaaagaaatacgtcaatgcccttgcgcccctgcttaagaatggaggttgggaagcccacttcatcactgacaccggtatgtaatcaagaaactttaaaacagcatcagatcaatcaccttcttctatgggtcaaagatctcacgctgaatgttttggtacaggccgcaatggagtccagcccacccagcaaaatgcatggggtgattggtgcaatgtcaagggaaccggattcggtgttcgaccaaccacggagacaggtgatgccttgaccgatgcctttgtttgggtgaagcccggtggtgagagcgatggtacttcggattccagctcggctcgctatgatgcccactgtgggtatagcgatgctcttcagcctgctcctgaagctggcacgtggttccaggtaagagtgccccgattgaaagtgattatttctacaacactgacgacttcgcaggcatacttcgcccagcttgtagagaatgctaacccgtctctttaagtctttggaatcggcaaatataggttccagggctagcagctacccaggcagcgaatgctgtgctttgtgctgattctctgtgttcccatttgatagtacctctgccgggaggcttagaccaataagcagatgaccaaatgctcataagattctggatgatctcgaggctattcccaagatctattgtttgccagcatgtggagtagatgactatatattcgactatccattcattgatgaagatgccatttatagacaacgtcgataccgccttcacagttaggtgtgcacgtgcacgggtagatcaattgccaaaaggcggtctgaatatcaagcagtatcctgaccgcccggtaggcgaagagcatcgataacgaattgcgggatatcttgtccactaccacttccacaacttcaacttgcgccaatcctttgacagagcctcttgttgttcttgatatcatcagtgaatataagcccatctgcattcctcagctgtgcagctttgggtgcttcagtgccccgggcgtaatcaccccacaccaacactctgagagacaaagagcgagagtgcacaccctgtcatggaggacttcaatagtgaaactgatagtgattacaccagctattggcgagactgggtaagtgaatttcttttcatcgcaatctgatttcccttgagaagtgaggcgttacggctggcgacagggccaccgtgggttggaatcgaatggagcacagcgaggggctgccgtgacccggacaaatatcgagcttcgtagcgtgttgctgcgacgattgtgacttgacgatatcgtgtctgtcgtcctggcgatatgaatacagcctgccgcgacacaaataccatgttctcctctccaatctcttctccttctcacatttgcatcctgttcggctcttatttttgctttactggatttccacttcatcatggtgtcttggctgtctccacaagttgtccttttcttcgtggtcttcttgggcggcgcagcatctgcgctgttccaacgcgcgtcttggtacgcggaccatggcgatatggattcttgtttcttgtgtgtatcgttcgcgatcacttcggtctacttttacgtccatttgctctgcatttacgtccagatatcattggaagttgatctagccaggtttgatccaaatgaccccaatggtccccgcggctctcctggctcggattttaaccccggtggacaaaataaaccacccagtggccagtcaccccaaccttcacggcgtggccctgcgcgtggagggtcttccacgtcctcgcgtttctccgattcccctctgtctagttacagaagccgtgcagtcttattcatgattatgctaatcgcaatcatgtatttgcagtttgtctcatcccgtggtaacgaatacttctgcgagattgacgaggactacctaaccgatcggttcaacctcaccggtttgaacaccgaagttccgtactatcagtacgcccttgatcttgtgaccgacgttttcgatcttgatgccgacgacgatctgcgtgagcaaattgaaaagtctgcccgtcacctctatggcttggttcatgcccggtacattgttaccactcgtggtcttgccaaaatggtatgttgaaattcggaacttgtgtgcatgttgtttcccagacgaaagtactaacctccgtgcagcttgaaaagtacaagaagagcgacttcggaaagtgcccacgcgtgatgtgtgatgggcatgctttgcttcctcttggcgagtccgatcttccgaatgccagcaccgtcaagctgtactgccccaagtgcgaagacatctacaacccgaagtcgtcacgtcactcgtccatcgatggtgcgtacttcggtacctcgttccactccattcttttccaggtctatccggccctcaatcccgagaagagcagccgtcgttatgaaccccggatctacggcttcaaggtgcacgccgcagctgcacttgctcgataccaagacaaccagcgtgaggatctcaagtggcgtctcgccgaggtcgatatcaaccacaggttcatcgaggatagcgagagtgatgacgatgcattcgagtacgacgaagattatgttgaaggccacgtggagcaagtcaagaacgacaagctcttcggtgatgcagcttcgctcgcatgaatgtcgccaagtactcttgagtgacatggattccattcccatatttcacgggcaacatttcggcgcaacgagggatacgtggtatgcttgtgcttttcttcgggtgttttcacgaatgacggcgttcggtagatcgcaaggataatttgcgatggttttttttttctccgacttcgtttgtacctatcacctatctagtccattcgggactcaattgaaaccacatgactcaattgaaaccacataacttttatcagatctcttgcaatggagatggttgctaggtttatatggccgggatactaagagataataagtacacgtatattattccgggtactatttgcagccgccgcttagaatgttgaacgattgggtacttcctcagaactacagagccagtcccatttcatgcaattgttcgaatgcaaacgtcaccgcgcgagccagttgctcgccgttctcccatgcctcatcatgagcaccggtgatcgataagatgcgaacccgtctatcacaatttgaagcttcctgcacgggtatctgtgcctctgccttctcccagttcctcaaggtcttctccatgacctctatctgaggcgcgtccaccaacccatcgtccttagaatacgccaggacaaccaaccttccagaattccacccgccttccactccccgagagccagtcaccttcgccggcgatacttcatcccagagcatctcatccgccccaaaggccccctcaataaactcctggtatgccgagatgtcagcatgcgtatcccgcagcagtcgcaggtcgtagatacccgccacactgacgatggcagtgggttgcactggtgctgtagttggcagggaaccggaagggccaggtatagcgacggtctgttcccgatgaccagaaaccgtgcccatcacagcttggaaggccagcgttgcgccgcaactgtggccaaccaggatgtatcgcgtaccgaacccgtatgtattctggaggaatgagagcgctgcctctacatcggtgatgtggtcagggtgtttcgcattctggaaatccttcggggcggtatttgagtcttgtgggtgatttgggtgagcgctgagtcggtacgagatcgaggcgaatccggcaatgggtagatctctttcgcgaagtatagattccgctgcactgaaagaggttgatgtaaccgctggatcccgccaggcaccaccgtggatgaagctatagaagtacaccaaacgttagtattgctttcggataggactgtgatggggacccgtgtacatcacccagtagccatctttgcgtggagctaatgttgtgacggcaatactttgtagattatggtcttggccatagacaatagtctgtgtttttgagtgatccgacatgttgccttgcggagttctacaacatctcttgatttatggggaagtgggacatgtcgatagattacgggcaggctaggagctgttgccatttgactgacatgttggaggtaaaaattagcttcgtcttccaatatccgtcacaatgtcctttaagtcactttgttcgttcttcttcccgtctcatgtattgtttaagacctctggtcgaatgagaattccccgatgagtccatggtggtgtaatattactgtattgcccctccatctacttagtggaaatctgtaacatatttcgttgtgtattggtatcacgctaagcccaatcaggaattaatggtccctttcacacaaaccctccaagtccaccgtctcgaccttaacaaccgcccaactgttgcaatctttcacaatggccgagtgagtgatggtcttttttgatcagcaagaacatgatgctgaccgacttgcagaattccagtccccctcgcggccgttcaggtcgaggccttggtatggtctccccgacgaaaatctcccccagtcctcgccagccagaaatactgacgtcgggtattccaggtggtgatgaaaatcatcaagcactgctcccagaccttcccctccactgcaaccggcgcaatcgtcggtatggatgtcgatggcaccctcgagatcaccaacactttcccattccccgtcgtcgaagttcccgccgagtcgcactttgacaacgccgctcccaaccccgccgctgccgctcctcgtgctaaggcaaacgccgcgtactccgcagagatgattcgcatgctgcgcgaggtcaacactgatgccaacagcgtcggatggtacaccagcgccaacatgggcaacttcgtcaacatgaacgtgatcgagaaccaattttactaccagagccagctgaatgagcgcacagtcgcactggttcacgatgtcagccgcagcgcccagggcagcctcagcctccgtgccttccgcctgtcgtccaagttcatgactgcgttcaaggagaacaagttcacctccgaggagtacgtgcaatgacctagtcgatttataagattatatgagcgacatgaatattgacagaattgcagcctccaaaagtccaacttgcgccaccccgacatcttcgaggaactgcccgtcaagctccacaactcccacctgatcactgctttcattcaccagttgcagtgcccgatttccacagcttccactgagctcccttcctccctggctgcccttgagtccagccccttcagcaaaaactccacccttacccccaacctcgacaacctgtccctcagcatcgatcccttcctggagaagaactgcgatctcctcctggacagcatcgagacccacaacaccgaggtcaacaactaccaatactaccagcgtgtgctcggccgcgagcagcaaaagatcaacgcctggaaggcgaagcgcgcacaagagaatgccagccgtgccactctcaaccagcccctcctccccgaggacgagtggcaacgtctgttcaagctccccgccgaacccagccgtctggagagcatgctcaacacccgccaggtggaacagtacgcgcgccaggtcgacagcttcgtctcgtccagcacgggcaagatgtttgccatcaagggcaacctgctgcccaacgaaacctcgaactaaacgttgatgattgcgaaggggagacacgacgcttctggtattgcatgacctttttacggcgtagggagggaaaatgttctctattttggatgttaatatgacttcctgtttcttttttcttctatgagcggagctgagtctctgggaattatactcctgctttgtatcgacttgtattcgatcatagaaggaaatcttattttgtttagaatataacaaacacattgaacaggtcaatttctcatgtaccttttttttatttcaaaaatagcataatctgtggatggaacaaagtgatctaagacaaatataaggttagattaatctatgaaatcgtatatctatgaatactcacatgcatgcatgcatcataactaccatgtgtctggatgactccagggattttgaatttccaagggaactgcagcctcaagctcgtcggcgactctgagtacacagacgggactaatatttcccaacagggtggcaatcgcagtgtagaaaataggctgaagagcacagcaagtccgatggaagagagtgtcaccaacaatatccgaagcctcgatgcagccaggcgtcatcagagaaagctctctaagcttctcagccacctgaaagcgaagaccgggcttagatcgaagctgcatgatctgggcatgtaaaaggtcgaggaagtagctccggtccttacagtagatactgtcgggagcagggatatccatggtgaagggtcgatgggagtgatagagggggagtatggatatgtgggatccgtgaagattgtgttggagacactgttgcttggtgacagaatttcgaggtgggatggaagctatttatacagttcgaatagttgacttcaaatactcgatgaagcacagctcgaaagatgagaacaatatgaatgtaaaagatcctttgtttacatcttctcttagttctcggatcaacttgcacacgaaggccattgtactcaagaagggactagacaaagcaaaaagacattggcttttacaaatatgaagaatactaggcattgagtaatttattctcatcaggaatcataatatacagaggcttgtcatatagttgagcaaggctattgacacttcgaaggatgacatgatgttacttgatttgatgttacttaatatactatgtacacatgtgaaaatacaacggcctggtacctttccatccctgactagcgatgtgtcgattaatatttattctgttcctttcgccgatcgtatgtctcgactaccatgcttccccagtgagcttcaatggaaggtgaagcaaccgataaccgaaattcgttggcgaaggaagtcgtcccgctcgaatgttaatctgcaaagattggtgaagcagcctgggtgctgccagtcctgcatcacgttcctttcgcaaagtcacaaactcttcttcgctgataccatctttcagatgtttattcagcttcttgtgatcctgtacactcacccaaggaacggggtcactgcgtccctctggtggataatcatgacctgtccagatcttgaagtggtcagggaggcttagaagcttgcggcccgaacgaaagaggtcgttggcatcgccgccggggaagtcacagcgtgcagtgccgatgtccacatggaaaagagaatcaccgcagaatagattatctggtaaatcttgttagtaattgtttaacgaggtcattattgttggttgataatcacctccaaccatgtaaccaagatgatccggtgtgtggccaggtaaatgaatagcctttcctctcaggttcccaatagtgaaggtctcatcgtcgtcgaaaagtacgtcaaaaatgccttcatattccactggtggaacgccatatctttcggcaaacaatctttgtactttttcaatacgcttaccaatgcaaatgggcggcttaagattttgatcctgggcaagacgtttttgaaggtaagatgatgcagtcaaatgatccgcatgagcgtgcgtttcgagaatcttatcgatcgtatagccctttcccttgataagagaaagcagggaatcggctgcgtgagtagtcacggcctgagtagcagggtcatagttcaggactgggtcgatgatgacggctgttgatgttgagggatcggcgatgagatactgccatgttccagatgtgggttcaaagacatcatgaatcacaggctcggtatatatagtggatgcagtgctgtatgtgacttggcgtgggattagatgtttggtcggggtagagaaggaacgaggcgagaatgggcggttccagctatgaaccgtctgccctttttgtgattgacgcactgtccccttgattgaagcgacgtttctcgaagattttgcggtatgagatacacttgtccgtgtcgctttttggatatgacgcaattgtctcaagttggccagcattgaagttccaattggcctgctagacaatctgaaaaggtctgacgaccattgccagccgatgcttgatgattgctgcttgaagcttatcatgatattccggatttgaagaacaaaatgtggtgaggaatgtcagagctgtcgcggtggtcatacttgaaaggcgtgggtcggcgactcggcgagcatatgggtcgccgattgaaagagtcatcacaactccatgttcaaggtttcttgcacggactatcgaattcgaggaacatatgatgttgttagcgaagtagattgatttaaatactgttgctaacgcttcaatcccatatgttaaggcgaatcaaagtctataagaatcgaatccgtatgcacgaccgcagtcataaagtgagagatagagagatactgagacacttcagagtccaagaaggacattgaaacatatctgaagtaaacaaacatcattgtaactactccgtaactacggagtactttctttcacctatgggaaccccgaaagtattcggcgaagaaaggccgaaactccccgatatcggaacgagttaatccgaaaatcacgacatcataagatcagctgttttaactacttcagggctttttttttgtcacattttgagccttacattccaagatgtttcagcgtcgcacagtgcttgctgccaagcgctctgtcgctcaatggaggagtctcgcaaccgcgtctcccgtgagctctgcgcgaaaccacaaaattgtagtggtcggcggtggttctgctggtctcaccatcagtcaccagctgctgcactctggcaaatttgcacaagatgatattgctgtgattgatccagccacatggcacaactaccaacccggctggacactggttggcggtggcctcaaggacaaagaggagctacgtaagccattgaaaagcttgattgatcctaagttcaagttttataacaatggtgttggctcctttgcccccgctgaaaactcgctcactctcgagaatggtgacaagatcaactacgagcaactggttgtggtgcccggtattagcatcaactatggtgctatcaagggtctccctgaggctcttgcagaccggaactcaaccgtttccacaatctacagctacgacacatgcgacaaggttttccgcaccatcgaaaacttccgcgaaggcaatgctatcttcactcagccagccggtgtgatcaagtgtgcgggcgctccgcagaagatcatgtggcttgctttggaccactggaaacgagctggcctctacaaccctaccagcccctctgaatcacccatcaagatcagctttgccaccggcctacccgtgatgttcggtgtgcccaagtacagcgccgtcctcgagcagatgcggaaggaccgtggtgttgagggattgttccagcacgatctcgttgccattgatggcaagtctgccgtttttgcttctcctgagggagaggtcaccagaccattcgacctgttgcacgtttcccccaaaatgggtgcttacgccttcgtcaagaacagccctctggccaacgaggccggatatgtcgacgtggacgataacaccacccgccacaagaaattccccaatgtctggtctgctggtgatgcttccagtttgcctacatccaagaccgcggcagcagtcacttctgaagcccctgttctcgttcgcaaccttttgcaaagcatggagggcaaggaactcgatgcttcttacgatggatacacctcgtgcccgctcttgactgagtatggcaaggtccttctcgctgagttcaagtacggtggagtacccaaggagacattcggaaactggtttggtatcgaccaggctgagccccgtcgttcgttctggtatctgaagaaggacttcttcccttgggtgtacttcaactacatggtcaagggtaactggggtggaccgaagggctggctataggccgtgtacattatccctatgttgcaatacgatggcagtacctcggggttttttaatcattaggggttgtacaaaagaaaaatgaaatcattgagcaaaatatctcgacagtcctaagtgcgttcagtctaatacaaagttaacttgggtggatatgcacgtgaccatatcaccaatgacatcatagctcatcataggtcgttatcgataactcgttatcgatcagcgagtgaatctttagtggaattcttgtcttgaattacattcttctctttcgaaatttaagtcttcgacatgtctctaggatagaaatctgacctctgttgctctgcatctctccatgtacaacactcattccgatatttgggtcgtgagtctcacccgatcaaagcatctccagtatactttcctattctcaccactaactggtcatattcctcaataggcaggcgcatttgccgcactcatagtcgattttatcgcctaccccttcgacacactcaagacccgtgtccaatccccagactatgagaaggtcttcaagaatgcgcgcacaggagcagtgcggcgcaatgtactcttccgaggattataccaaggtgtttggagtgtggtcttcacaacaattccagcttgtatgtgttggctcttgttgatgaacagggaactaggaatatcaccactaacgatcctatcaacgacaatctagctggcgcattctttaccacatacgaagctgtgaagagcattatgtacaattcctcaaaagaagcatccacgagcatgaacggtggcaagagaagctcacccgatggctctttgaacagtcttcgcttgcccttcacacattccctccctactccaattatgaatgcaattgcctcttcggccggcgagatggtatcatgcctcattatcacgcccgcggaggtactgaaacaaaacgcacagatggttcaaggctcccatgcggacaaatccgccatgcgacaagtaatctggcgattccaacatcatccttggcgcctatggagtgggtatacggcactgcttgctcggaacctcccaaacacagctttacaatttccactctttgagtatgtacgatcacacctgattaaccgacgaagacgattgaaagcgactcggatgaacactggtcaaccaccatcggaaatcaaggatcaactagtcgaacgggccggcttgacgggtatagctgcggcaatttcaggcacgatcgcggcgacagttactactccaattgacgttatcaagactcgactgatgctttcggcaagtgatgctgctagttcccaacataaaagtactcaggctggtactcggggcaatgaggcgatatcttcggatgtgcggaaaaaaactaaacctggcaagactctcatttctgtcggtcgtgatatcatacgatatgagggtgtccgtggtttgttcaagggcggactgatacgggctggttggacggcgattgcactaggcctttatctcagcctgtatgaaggagcccggttttatctagagaatcgacggaaggagcgcgagcatgtcagttagagacttggaaagcaagctggtggcggggatgaagggatctagtgagaagagcggtgttaaagcctttcgtttcgctgccgtctcagtgagaatattcatggctactcgactcgcaaatttccatcaacgaccctagaagcccgggcttggaaaaggatatttctttgttttctaaggttctgatgtgtccctttgattccattttgaagacaaagaacaaagacgggacctcaactttgtgaagcacattgtatttagtctcccgagactgttctggataaagaacaaaggtaacaagagcagaaggggtgtctttgagttcaggtagaatagtgtgaccaaggcttcaattatataaatcatattcccaccttgcacgtaatcgtaggtccatcccctactagtgtgtttcgattcatctattcaatccatttaagcgattacaagatcgatcatgccaattccatctggacatcaaggtctggacatccctatgattaccgacgaagactgggatgcagatgacgaggactctggttcagatactacttccgatagctttgacttggtgccgatgtcgacggcactgaaaccagaagataaagtccgaggcttatgtaccaacccattgtttcatttcacggtccaccgtgaagaacatacgtttccaggccagtgcggtaaatctgatggctggattaacacatctcattttctctggaccatgtgcgctacactcgcggattcaggaaccgatccggaatgggcagcgacattcgaagaatggcgaccccagtggaacaaaatccaggcgcaggtgaagagattcggatacactcacttttcttctgagatcgctcctgcaccggttgatcttgtgttggtccaattctttggatgggggtatagtggagaacccagagagtttgagattgaacaggaggacccagatagtgtctatgactgccaggatatgtggaccttttggcgatacattattgagacgccggcaagtcagattcgacagattgttgtttgcctcaaagatactgcgaggcttgttggctctgagtagaatgtccgtaagatactttgagaatctgcacatgtgagggataatccttgccgttgagtcaaatttgtttttaatacttgctcataacccacccctcttccttaaatttcagtaccgccttcctgatcttagtaccactcagaattctgccatgccatgtattctgcctacttctggtttatatagtaaaaagacatgcatttcgattagaaaaatcgtatattctacttgatacctatagagttaaaccccttgctggataagcagttaataaagcagtttatgataaagcagttgacgatgaagcagttgatataggatatgacagaagtgacttattttttttagttgcttacatacaaaccataggtacctgctgtcttgctactatcatatgccgtttggaataaaagcggtaactatacaaattagggcgcggtactccgtaagaagcaagtgtcgaggcaggtgctcaaccaaattaggaaggcggtactgaaaattcaggcaagggggcgtgtgagcatctaagggggtatgagcaacaattccctattagtatctcaccaaattacgatattctcacgtaagaagtatacgagtgatctcgacggccgcaggtcggcgagatagtcgttgcgtacgtaagactctctggtttatacttgctacgcctcgctccgcaattatctgatgcctagtcacatacatgttccatgtgcttatttatgactatgtgtaccggattctccctggtggtgggggtttcctattcgggctgccgccgctttatgagagcgctcagactcaggctctcagagtagatatcatcatatgctatatgtttgcttgcttgcttgctagttggttaacgtaattcccggccaagctgcgcagcccaagacacatagtaaaagcgataaataacaacatgatatttcaacaacggttgtctacatgagcttttccttctagtctaatgctttttatatgacatcttgctacttattgggtttaggaggatttgataaattaatgactgagatatatatatttcaagggttcagcgacatagttttcgataccataatgatataagttctcgatttattcataactgggatatgatactaaaaatgcttatcaattgctatcggcatataatggaaatgaataagagcgttggttgttgagatatcatgttgtaatttgtcgcttttactatgtctcactcggccgggaattacatttaactcacatggccgcttaatcattctgttcataccgccttcctattcaatacttaagggctttaggaagcctcacgtgtacatacgccttccttcgccgaaagaaatgcccaacctagagaacctactggaaattatgtttacgatcgcaaatgaattgaagaagacccgagacattaactcattggttcgagcaagccgttatgtgttacaatctgactgcactcctgtatcgcactgaaacgttcggtcattctgaagtaaagcaggccttgcttgaaagcgctcagattggtttgggttctctgaagccggtcccggaagggtggcaatacatccagaggatttatcggaccatcccacccaaccttcccaaagtctccacttcacacctgagctctagtaagatgtggagatcataagttcaattaagaaacccatgaatgtatgaatgtatgaatgtcttgaaagtctcaacactatgtagaaaagtcaaaggttcttgaagagatcgactaccagatgttctgccatgatgcagtgtaaacaaatgcaactgatacaaccaacaaccacgaccatcatgcacgcactccatagcatattagttgagccagttatccctgctgctaagagtttttgtgacacagaggtgtcaaaaccgaatttattatctctcatacacccttccagggaccagggtcgattgcgtatcttctacgttaaatgttcgttcctttcgttcgcttcacctatgtttccgtgcgtgctgcactgacttcctgtatccagcatattctggtacatgggcttgaacatgccagattctttgttgccagtaatccttctatcccatgaaagccctacttctgaagagaaaatcccggtcaatggaaatgtgtctagatacgatatcctccttgtagcattccacaagccttataacgatagaaagacactcgctacggctagcaccgtaaattgagaccgggaatgatatgcaaaatcccctcccctggtgtatgggctcagagtcgactgtgaactcgccgatttggagacgttcaactgtaagattcatcaactcgtcatcggaacagtggcggtccctgttagaaaatctcaccgtaaaccacaaggtgcctcggaacaagccatactcatcgatagtaggaaagccttcacggagaaagacggttcgagtggaatgcatgttatggtcctttgacagtaaccccagacttggaaatggctaaccacaggagtaaatattctgccagttttgctagataggtgtttgagcagccggaggaaaaggtaggatttctttttgttctgctaagtctttcatcgtctagccttttattttgggatgtgaaggctttgttattgtatccttccatcaaaagctcaaggcgagaaaataggttcagagacctgaaagtcaggcactacaacaaaggaaggatatagactttgttctcattccattcaagcacaccataagccagactatataaggtcccaatttaccttctttttaggaatattccatttttccagtccaccggagactttcaaactaccaattttcactgcggatattatccaccaccaacatggttgaaccaaaaaaaaccatccgatctggaaaatcctctgttgaacgacctaataatgggtttaccactgagcgctcagttggcggcgagcgtcgttccatccgccactaccacgatggtcgactatcgcaacgtgagagtcctgtccctggccctgtccaaacactaatcaagaccaatattatgtcgaagacaaaaagcactagacctttttccaagctcagggaacaggaaccggaaccggaaccaaaactagagccagaaacggaatatgaatctcctactctcgccgaaattgagagactctccggtgctgttgctacactcttccacccagaccgttctaacccctctgagaagcctcccccgaggacaatgagcccacagtcatggagctccgagagctcatatggcatggttactccacccttccctgtagcctcccctactcctggagattcacccgaactcatgagcacagatgtgcttctccctccagcgactgctaggtctgatggctcagacgatgatgccgacagtatttcaaagaagtggaagaaactgggtggaaagaaacgcattggaagttcagatattcacgactaactggatgtttaccaagaaagattttcttctggcgacgtattatacatgtaggaaagtacaacgtagacatgtagataggtacatggcgggacccagaggactagactaccatcgtacgccattagtaccacagtggagagccaaacttgctccagaatgaagttgaaacattgaaaattgattgccatatccaaattaaagaatgccaaggataataattggcaaagtgagcaactcgatcactatctggacaaaacacttcttcagatgaagttcaatcagccataaaaactgaggaacgccaaaagacttcaatgaattgctaaatgcagcaagtcctgaagggattctgcgtcctccaagtatctctgcaatagttgatccacgtttctttgtcggagaaggaatgattgtctccaagttcatcggtagaaggctagcttcggtcattatgagagtgatagatgctggcagtagtcctagcaaacggaatgcaagcatgatgatcactgcaaaaacctcgacactagcgcgcctgctcgtggagattggcatttcctcgccggaagaaatcattgacctctggattagactctgggcttcgtacatcaaggcttggcaaatcccatatgtgaaactagggactgccaagtgtatccatttcctttggacttcatcttctgtcaaagagaagagtcgaagtcgatgtgctgagatagtagcacaagtccagatcaaatgaagtttgcacagcagaacagaggaacaggcgtatgcaaatggtatcagtaattcgtgtcttagaattgcgaattccaagaaagatctgatcgcataatgagtgacctgatagacaaggcctagcacaagcgcataggagaatgtgtgaaggctctgtgtagtatatatgagatgtatggccttgtaaatggatcggaaggtcggaggtcgcttgttccccctttcttgatctgacaaagccccatccgctcgagcaatctcaacgatcaaagatgtcgctactacatggccaagaagataacgaaccttgttaaagatcgattagaataaattatagggaagatggccagacgaggaacttaccaagccggaaagcaaaagccggctagaaatgagagcaaaagaagaaaatgtgagctctttgtgtatggtcgtagaaagggaaatttggtcaagcagatttccatctcctcctggactgatcagaatgttcaagacccgcgaaggtaaacttgcaaatacggcctgactcaaagtgagaaacattccaaatcgtaattgatgggaaattgttgcagcgaggagattcaccgaaggcagggtcgcactacactctgacgataataaatttagaaagaaagaatggggaaaagatagaattgggctaagccaacgttcatcggttatactcgcacggtttaaagtcctggtcgatgtgttactgtttgcattgtttacaccatttgcactgtttgtactccatcaacactcccatcctaatgcctttccttttttctcttcctcgacacttaaattctttatgaaatgcgctctttcctctgaggatctggcagataacagctgagggtaatctttcactcaatctgactaatcgttcaagtcagtttcttcctcaagcttacataggggtcaggttccgaaccctgaccggataaacctcgggattatttatgttgtccaataacaatcgccgtccctcaccaaaagaagccctgccaagaaacccatgtaagcagctaagcattatttaggtacagagcggtgctgcctgatgtgacctcggaatgtctagcaaatcccgacaacccggtctgtcgagagtgactccacaggactgtcaattgaagatcaatcaccaatttaggccgaaatacagagagagcattgcccaagcctggagtacctgcttacatgtaagattcttcgaatccttccaacctcgagtttgtagaagttcgtcagcttactgggggcctctatttcgagaatagctctcccaaaactctgactacccagagatccatggacacgatcattcgatcacgcggcatgccaaacttgaacgttactaaacaaacactgccgaaaatctataacgcactttaatcatgcatacatgccctgaggattgggcaaaacagtggtaatatagcataggatgaattctatgcattcagggggcggcgatactagtcgcactaaatcaccctagtcaggaataaaatgaattctgacattaagagcactagggctgacagctccgcatgacgaagtaacattcctatggggaccgaatgtccacaagtgctaatcagcataagctcaacggaaaaggctcatacgatctccgtttctgctcgtatcgaggccggagaggccacatataaaaggctcattgtacgcccacatagagcttcacaaagaagaagacgagaacatcctgtccttgatcaatcaatcaattctctgcgccgttcttcccatccaaattccttctcctacaacacgattcggtatcctcgtcccaaaacaatgttcaagaggctttccatctctgcctgggccattgcggttctagccactaccgcgcaatgccagcaactcagctatgaagatagcattgccgctctagcgtacggaaacgtggccaccgatacctcttccgcgggcgaagtctggctcaacgtgactgggtttgctgtggaggagcttccacacattcagagcgatgtgggaattcacacattggacaacctcgagacactcactgctattgctggccttgcacaagacgcggcgaagagaggtcagtggggagacattgtctacttgcatagtgctttcagcatgaatggccacgtcgatcatctcaatgtttcgagtgtcgagatgcaggagtcactcctggaggctgttacaaaccggaccagcggaaaaatcgactcccctttagtcgagctttatgccaatacctcgagctcgacattcttggctgaagcttttaagaatctcaaatcagacgcaaatccccaaagaaaacgctggactaaagaagcttgttcaactgcccaccgcgctgtcacaagcgcctgtcgaagcctccttggaaatatcaacgacaatgccacatggaagtcaggcggtcctcggaatatctgccaatatggttgctgcatcagttggagtgcgaacgccactttccagctccagaatctctcaagtgctggaaactattgcgtgaacgcgtgtgcttcgagcacagtcagttgtgagatatatggtgtcacattgcaaggaactgtcgtggatcaatgtttgagtaacagagcaaacggttgcacgtaatgagggaaccaccatgacctcattcgaagcagatctgcccgaagacgggattttcctatggtctattctcaagggttgaattcaatgactgagtttcttgttggtttcttttcttttgcggcatttacttgtgatgcattctgacgtgctcactgtcgccccatgcagtttgtagacctctctgtgtggcattcctttccctttctctttctattctctggcagacagctcaccggcaaacgcgcagcttgccgcgtccgcgctttcctttatatgtctgcagagatacttcttctgtgttcttgtggatggaatctggctggctttgtggtacgaaactatgtaaatagacttcaatacagtagctagtttctgatcctccatgaatatcatctttttgcctctggctgattattacttcccttgtagtcaggacctttcatcattatcttctgcggtattcacttgtgtatgtagtatctcatccattgaaattaatatcgctccggcaacttcatgaagccgctcgggtctttctcatcacatacacccctccacagagtaacttatatttattttcaaggctccctaaagggcctcacctaaaaagtatttatctaagcaaactaaaatcctttctgcctgaaaaacagtgcagttacatgactaagcgagctaagtgtcccccgcaggtagattttcattatgttcgtgatttaatgggatcttatctggacgatcttcactatttccccttccctgtattgtctttattatctctattcgaacagtactgtggaggcgtcaatggcggccccggcgatcatgctatgatcgaggaggcagtgcgactcaagcataccaactcttttaaaaactgttacactatgtttcaaggcgacatgtatgccacatcttactaactcatggctaaagaggctctggctatttttgaacccgcaatccaagctcgtatctgtgttccacagtcagtcggagaatttattatccaaaggcagatctacaccttgcaaaccctcaatattctcattgacgatattctgagcggctcgcaaacacgaattcaaaaggccccaccaaagaagaagaaggctactgatgacggagcgacagtggctatgtcgaggctcagtatcaagggcccccaaacgcggcttaggctttccgacctggtcgccagggctcgtgatcaccaagacacacttgaagagtactgggtttgctacccactgagcctgttgtgcttgctcatgctgtcaatatttggttctttagccgcccagaactcgttcccgacgaaaagggacggcgattgccggttcacactgataaatacatcagtgctgctgttcttgaggctatcaacagttcgatccaaggagccgccatctggaaatacattgctagtattcttggggtgcttgacaagtgtgttggggatgatgcctctcgagttgttctcctccaggagatctccaacatatgtcaagtagagttaaatcgtgcgcaaactctgttcaagcgacatgttcagagtgcaagcggctctaagtggttcaagcgaactgccaatgtgtatgacagcaccggtagccggcgcgtttctataaaaggcaatctggaagaccttaccgtatctgacccccagctccattacatgttgcgtctctgccagccaaagctcaatgtttccaccgccactacctggatcaaaaaactgggcgagtatcaagaagcccatcctagggagagggaaaatctggaagatagagaggctgactcattgggtgacctggctatcatcattggatttatccatgacttgtcctctgtgcttccaattccttccttttccaacaaaaagggccagatgtttgccgctaagtcacaggtggtggaatctgaattaaaccagaccaaggatcaactcgacttgctcgattacgtcgttcccatcgataacctcctagaaccgggagtgcccagtgaagctttgaaaaagctagaccaattcatcatcgaaaaatccgggacaaaattaggattcttgtaccaagacatggttgccgactgcctgtctggcgttcaggctcaatgccttgaagccaaagaaaaagtggcgcagggctagaaggctgaatttccttctgctccggcaacgaccgcagagtcgacggcattccgagtcgaacagcggaaacagaaagaaaaaacgcgtcccgcacattcatccatctacgacattgttacgcctgtgaagccgtcttgtccacaggagccagcttcgctgctgcaaaccttcaagatagacgattcgacagcagaggtcttctcgagactgttcagcaaatctcaagcacgtggcccagccgcctgggcggccttcgccgaggcgatggctaaattgggattctcaatctctcccaaatacggctctgtttacactttctatccacccgacagcatgacggcgaagaagtcattcacagtgcacagaacccaccagtcgaaaatcgaaggatatcgggttctcacggtggctcggcggttgaggactttctatgggtggggtgaagagacattccgagtcaaatgagttaatgacttcagctcttctcagagggatttattacgatactactacgatgtttcaatctctctttgaagacgtcttttgaaacgtcttttgaaagtcttttaggaaacttgaatactacgaaaggcacaattgccataaatccgctttttgatccaattaatgcatccatgttaggtccctaatggttgctatgtatgcaagttgaactatggccataactaggctacaggcataagtaggacgataaaacgctgtcccttgctatttcacaaccattcaatctcccatgttggcaagctagaagccaggctcagccagaatattcataatgatgaaatgaacacacatgtcgcacttagggttgataccaagtctcaaggccagctgtggcatccttatccggagcaaattgcagattttgggaacatcaaacttgtaaaaatagtcaattgcagtgatgcgattatggccattttcgtcacaagccgtggcaagggaagcttgtgtgagtcgaccgacgtactcaatgccttgttcacgcaggctcactttgacatctgcaatggtatctgacttcggctgcagtctgataaggcgagcttggtcttcgagccatgacaggaagttggttcgctccgtctgatagtcggagatgggactagacgcggacattctgagtctggatgaacccgagacttgtcgaggcgtgtgcagcttagcaggcttcgtggctgattttgaggaatggaaggttcatgaggtgcgtgggtgatagaacaggcttggagcttgagttggttagccatggtgtatgggatgcaatagaaggtccatgatactttgataaggtagagatatttagagttatccagctgggaggaggatggtgagaacaacgcatggttttataccttgcgatcattggagaatgaatggcattgaggttgtccacttcaaatcctattgagaaagagaagaatagcaacgaggccattgatgccgcctttaggatcaggccacactcttcacttctcagaatcggatttattcgatgaggtttacttctttcatctgtgtagcctatgttatacctaagcttgtttaaatgcatttcatccctcatgatatatagaaaaggactcttacagtctagacttttatatataaccttcgcataccgtacataccaatttctattcggtgctattgttcatttctttcagttataccaggagaggtcattcaagttgcacatccattcgctacggactacctggttggcgaacatagagcgtcatattatcataaagattttattgtagccaatgaaaccattcataacagagaattaacgcgtatattgctgggtcataatatcatacgaactcatacatgtcatcacatctgttctgtcggaatctcgtcgcagaccttgtaaataaccaaaaagacaaacataacgctgcaaccattatacaaaacgaaaacaaaactttcaatacacaatgatatataatgaccaaatcttggtttacaggttcgtcaatttgcggaaccaactggtgggcttcttagcatccgcactgggcggagcgggctttatctcacggtcacgttcgtgatcaccacttccagagctgctcttcacaccttcacgacgcgaattatgatgccgaggacgagcatcatcaatctcttcttcctcgtacttagcacggcggtgggccttgcggcgaagaacacgacgagcttcctcatctgatgaaagagaatgagaatgagcattgccaccttcatcgcctgcaagaggaggtagatcaataagagtagggactatctgcggtggctccggaggctcatcaccttgcgagtaaacccacgaggaaatcttgtctttcgcactcccgccacgattcaacgcaccagtcatgagcggctcgcgagttaactcaggggccaccttagacctgcgacgacgagcgttcgggtcttcatacgggcgagaggtacgggttcctcgacggtcgacctcacgctcatcaggaaagacctcaacagggatcctttgctcacgttcacgacgccggctcgttctcgcggcgatcatttcctcttcgcgcattcgccggcgctcgcggcgttctgcagccttagcttcggctgcagcttgggcttgggcttcacgagcagcctgctcttctcgagcacgacgttcctcgcgcgcagctcgtcgggcccgcttttcttctcgtaggcgatcttcttctttcagacgttcttcttcttcctcttcacgagcacgttgctcgcgcgctcgttcttttcgcctcgcgcgccgctcttctgcttcccgagcttcggtttcacgagagtcaggaggtaccttgcgggatccacgccgcgcatgtcgtgctgcgcgccgggcttccgcttcatcggcttctgtctcgacacccgctgctgcaccggcggcgtcgcccatgaacccttcggtatctggtcggacagatccgcggcgtcgatcttcgcgacgcgatcttcgagcgccgtcgcgctccatttctggcggatgtcttccgtcgtcatcacgatacgatcgcgacctgcgtctgtcgggcatctctggtcgttctggccgatctgggcgtgtgccttttctcagagaatcgaagagccccatgaatccaccgctctcttgtttcttcaccggagcggtgttcgagcgctttaggcgacgttcccttggaggagcatcgaaaaatgccatatcgtcggggcctgacataatatctgcggtgggatgtgcttgatatggatcaaccaggacaacatcgtcctcgtcaggtctgtgccgcggctatgaaaggcggtcagttggtacaacggcacaacaaatactgtgcttatcccgacatacctgtctccttgacctgcgccttgagcccttagagccttccttgggtgaattcctctcggcatcctccatgtcaaccacaacgaggtcatcgtcctcgatcgcatacggatctcgaactgtttcgtaggcagaaagtcagcaagaataaatgagttatgacgtaaatgaacatacctgatctccgcctgtccatgcgcgggcgctcacgtcgagacttgggaggatccatgcccatcagcctggctgctttgtcaaagacctcacgcttctcatctggacgtgctagatcggcagttctgtcatctagattaattgatggacgtctggatacgggtttcgacgaagaaccagatttgcgagtggatttgcttttggactggggtgtacccagtaccatattggccaaggtcacgccacgttggttcttcgaggaccgcccctcacggtctcgccgcttctccctgtcagacgcagacctttccacttctggttcggggtctttgggtcgaggttttccagtagactcttttctctttggaggttcttcctcttgaatctttgcttccttctgacttaacttctttggaggttctgcttcctcttgaatcttgttttccttcctcaacttcttcgggggttctgcttcctcctcctgtgtcgtgttttccttcttactcgacttctttgggggcggcgcagccccccaaaagccccatgatatggtgttcgtgttcttttcaccgcgtgctcggtccttcttagatgattttggaggctcttcagcaggctccggtggaggcgcggcagaaacatcttcatccttctcttctggctcgtcggctacgggctcgggctcaggctcaggctcaggctcaggctcaggctcaggctcaggctcaggctcaggctcaggctcaggctcaggctcaggctctggttctagcgcaggtattttttcaggaggtggggttggttccctagcagcggccgctgcggctgcggcggcagctttttctgcttctgcctttttatacttcttcagttcctttttcgacatttttgaaagatccggggccggtggctcaggttccggctcgggctcaaccactgtctctggctctggctcgggttcgggttcaggcctgggctcaggatcatctccaaagtctgggaagcttccagggatagagtccttagagactttcctttcttgagactcaagagcttctgctgtcttagactttgttcttgagcttttcttcgttgaagcacgctcctctataggaggttctggctccggttccggttcgaccttcttttctttggatttgctcttcgagctagccttttctgcctttgccttctccttcttggcgagctccagggctttgatacgttcagcaacactgagcttggaagccttaggcttcgatatcttttcgggttctggttcgggttcaggctcaggttcaggctcaggttcaggctcaggctcaggttcaggctcaggttcaggttcaggctctgggggattttctccaacgtcaataagaaggtcttcctcttcctctttcaccttaatcgtttcatctgccttcttcgttgttttgcttttgctgctagaacccccagtcagggtcgaccagaagccttgagaggctttttcctctttcggagcttcgatggcttttgtggttttctttgtgcccttggaggttttaggggctacttccgcccaaatgtcatcggcattgtcatggaaagcttcgggatctggggttaagccctgagcaggaggtgtcggcgcacgtgggggaggttcttcaatattactgcccttcttcttctttttcttgtcctttgctggcccccaaatcccccaggagctctcatcggcaggtttctctggttctggttcaggttctggttcaggttcaggttcaggttcaggttcaggttcaggctctggttcgggttcaggctcacgttcgggttcgggttcaggctcaggcaccggttcaggttcaacaactggttcggggacttcttcggggggcttgttcgatggaagctcgaagtccttgccgggaatgggcagtcccttacgtatcaatgttttttctcgcttcttgcgttctttagacgatatctcatgccaattttcgtatagagggttatcaggcacctttggcgcctcgggttcgggttcaggctctggttcaggttcgggctcgggctcgggctcaggttcaggttccggaatgggttctggctcaggtactggttcggctttgcctttgcttttctgcttgtccttcgatgtaactccccaagcggcaaagggatcaactggctcttctgctttcgccggtggttcatcgatgacaggcaccggatcagctaggaggtcaatcttcttcttcttcttcttatctttggttatcattgaaagaccccaaccccagccagtatctgcctcggctggttcctcgatttcctcggccaccggttcaggttcaggttcgggttcaggtacagccgcagctgctgctgccgctgccgctgccgctgcctcagcttccgcagcccttgctgcttcctgctctgctgtctcctttgctgcagcttcatcctcctctttccatttcttctccatctccttcttcgttttacgttgctctctctttggcagatttagaaaccatgcttccttcgtgaaatcgactctgggtgcaggagccggaggcgcaggcgcttcgggttcgggctcagtctccttcattttgtctttgctcgcatcccaacctcctccccaatcatctttttgcttggtttcaggcggtgcagatcctaagtcaaaatcaaactcgccagtctctgacgtcttcttctttggggttgctccccaggggttgctgtccttggattcgtcattgggaggagggtcaaccttgctagtagtccaggctttgccccatcctccgaaactaaacccagtccccccggtcttaggggctggactgtcgaaattcaagtccaattgcggtgccccgtcattcagacttatgtcttggaaccccccaggaggtgcaatctcgtcctgtaattttacttagacacccgtcttgtacattggagcagaatggtcttaccttccccttcttcttcttttttcctacattcgtgaaggcagcccacgagtcatcgcccccatcttcggcccagctaagatctttggcaacagaggcttcagaggcctttcgttcttcctcttccttggcttttctttcttcctcttcctcctctaatttcttcttcttatccttctttccgctcacattccaatcaccccaatcatcacccccatcacctccatcacctccatcgccgcctccagcgccgcctgaatctccaccagccccaccggcaccaccatcaccgttggatttgtcgtcgtctccaccagccccgcctgccggtggtggcggtggaggagaggaagtcggtggtggtgctgctttctttcctgttggctttttcttcttatgttcccgaatacccgtagtattcccaaaatcaattcgtacatccagcattcgatctttcggcagcgacgatgacggatcacgcgatttttcacgaggctttggcaggagggaaacaggcgtcgatctgcgctgcgcgagcggaggcagtgcagagtattcgggagggagatcatggattacatcgtcgtaggaaggtggaagctggtcgtaggacggtggttctggtgagcgagccgcaaagcgagaactcaatccggtgactaaatcttcttttccgggcacccagttatctggccggcaaaatcttgttttcttagtcgagaaagtagtccagacctcgcggaggagtttctcccccatttgcacatcccgtgcgtagtatgcgacatcctccgcggcgctagtcttccccgcacatacacgataagacccctcaattacttccatatcgaaaatcgcatgcgccgagctcacggtcggtccgatcacttatatggcaactcagcgacgtccaatagcgaacgcatcgatcgatgatttggattcaagtcctggtggcgggtattgtcccaatcgatcacggttttttggggcgcggagttgcgagagtgcggtattggtgtcgtaaggttgcgcgagggttctgtgagactgtgaggcaatatatcaagttaaatttcagtcaaatggcttccctggacgctcggcgcgtgtttaggtgctgttcgatgctgataagatgatgtatagacgggttaacagacggcgagagtctctaaaactgtgcctgctataaattgggcacaaggaatttcaaggagtcaagggagtcaagggagaaaagtatgaaaacgtgagactggggaggggatctggagaggcagggataataagttcaggcggtggaggtgaagatcatcccgttcagcccgctaagttcaatgtaggcacgtactccggccgtacaatgtactcgtccaacgttgctgatgcatttacgtattcgagggtgttttgatattagcgtgaaaggtactcgagtcactcaatttatacatgttcacggagtacatagtatatgaacaccccttgcgggtgaaacaaaaacatagatggctgggaacacagaaggcacagagcaagtacgaagtacactgtccttgaaactaacgatatgtacttcgtactttatacataatgaactcaaacactcacgaatagacttttctctacaatctgcatgtcaacaaacaaacattgaacgttacacagacccgcgatgatagttccccgattccatggttcccaattcgagtccacggattatgagagtatatcttgtgtagtaccgtggtactgtacccaaaataaagtctaattccatagacacatataaagcacggatccatagatgtacaacatatccacagtccatacaatatataccgatctcatacaatgcaggcacacatcgtatactgcaatgcttgcatttctacccttgggttatgaccatagtcagcatacgttttacaaaagttgcatgggatacagggtactctccagatagtgcaaaattcccctcgagcccaattcactcgatgcatcccaatccaaaagagtcacctgcaagcgcaacacatcttttgcacaccgccacttgaacttcggaatgaagaaaaaaagggcctagtgcggggcaggtggagagtcaaaagggtcctctttttctctctgactcattgatttaatggtgacactgaatctgttatagctacagggaattgaatgaattggaaatgataagtcccccatggattcattatgatatcctattccagcgcttcccagctaaaccaaacaaaaacaatcagtgtagagaaatagattgacaggacgaagtagaatacaatggggatcgcgaggaaaattgaaaaccgcatgtgacaaacaagcttgagagtccaaaccgagctaaacacttccgagaacaacctcaactaggccggcaccatcccaatggatcccaaccaggttcggattttaggctcaggttgaaagcgagacttcgggtgattgatgtcggctcttgggtgctgggaatccgtacgcctcctcgtgctctctctcataccgttggcgatcttcgatttgcaatttgtagtagcgctagattactagtcagcacgtgcaattcggtatgtatcaattctgctcggtgtccttacttctttctctgattcgggtagttcattccaatcgtgggcaataagtgtgaatgcctctgttccgggcttcccctggtaatcaatggtttcgaggcggtctcccaagtataagaggtaggcagatttcgggagtttgggtagacggtcatctttgatggaagggtagttcttgtcgacaagacgtgaaagggataggcgggcagtgttggcatccttgatctgaaggggagtgtgcgacttgacccacgactcgtaggcaacagcgttagcagctatgttcaccttagcctgggcttggagtctctagatttgggagatcagtatatcgctcctgacgtatacggagaatctcaagggcacatacctcctcatcttgaggattgagggatgtggaatgctctacgccaatcataaaagcttccttgaccgggtattgacctttgatcgcgcgcagcttctcagacaaagcaagactgtaagcagaggtaggcagcttcttaggcgggcggatcagggcagtcgccttgagttctctgatctgagcccggagttgcttgatcttccgattttcctgttgtgcctcggtgagatgcggcttcttcgctttgatgccggcttttttggtgctcttcgccttaggcgtcttagtcgccttgggaggggtagaagcagtagcgaatgaattagactggaatagggaacggatggaggaaacgggttgggcttgcggacgcatcgacccagagttaacggttagacagatgcgactaagctgattctgcaagtcgttcacgccagtacggggagggagagcaccgcggtgcagggtgcggaggaagcccccccgagctgcagactgccaagtcatgaggagatgatcgatttagctggagcgagctgcaataatagagatcgaaatgcgacaaattagcaattgaatctcgaaaagttaagaatcgatcagaggagctgttgacgcaaaccgagtaggagtcccgcctgctttggtgtacctatccgcatcgggcctagctctttcacatggccttatgtaagctgtcattccaaacggtttgcgcaagtgacaatatggtagacaaacacctcaacgttctttctctcggtggcctgaggtttgaatcgtgccctcaaacgcttttcttacgaggcgctttttcttctcccttctctttctctccccctcctctttctctcctcctcctccatcaatccgtgtctcgggggcttttgcgttctagtaaaactcactgatcagcctgcaacaatggctcgccacggagatactcgctcaccatcacctgtaggcagcacactttcttcatcccgacgacctcgcagagaggatgatcgctatgacagaaccaggcgggatgatgggcgcagttaccgcagatcccgcagcccagaggtaagtgcggcgcatcgcatattcgtatcttatcttgcaatttctgaccatccttgtgatatttagagacgataccgcgggcgcgaccacccccgcgatagagatgcatttcgacgaccagatcttcccgtagaccggcgcaacgaagatacttatcggccacctcgaagagaccgatctcgagaacggcgacgaggcgacgaccatgatctccaccgcagaactcgtgatagggattaccgttctaggcgagaggactcccgggatcgggaccgcaggcggatagatgatcctgctgacttgaagcccaagtctagacgggatgacagtcgtgatcgtgctttgagccgacggtctagatcccgaactcgagaggtaagctgccagcgtcttcgattatgccgggccctttatattaactgtgtcccgcagcaatctaagccgtccacaccggttcccactgcccagaccgacgaggagaagaaagcagagagacttgccaaactcgaagcatggaaacagaaacaggccgccgaacgcgaaaagaaacaacgcgaacaggcatcagttgatcccaagaagatcctcgaggcgattgatcggaaatcggttgtatctccaagtcctgccgcatttcctggaaagttgaagttcgatccaaaggccattgctaaatcatcaaacacgacaaccgctccccccgctgtgcttggtatcgatgttgccgtcccggcatctgccaaagcttcgtctgtgacaaagtccaatatacctagtactgtgcccgacacgctctctgagcccttgaaagccaagggtaatgtcagcgggtttggcctgggtgcaagacaagttctcgaagcagagaaaccctccgcttctaacactctgggctttggggatggagacgagggatccacacgcaagaaactcgaaaaattgccgaccacgactctcgatgtgacggctgggcaagatgatgtagacatgcaatctgaaggaaccgacgcagcagctgaaacaagtgccgcaagtgaacaccgcgatacacgactccacaagcaaaccgaggatgtccatatggaggactcgacgaatacgcaggctgattccactcctatggaggttgacgatgctccagaaatcgaccctctggatgcattcatggctgatctccaaggctcggtgccgcctgaacggacaactggggccacgttttccaagaacgcgcaccatcaacccgaggctatgtttaacgatgacgaggacgtggatgtgaccgcagttggtgatgagaaggctgaagatgtcctcgagatggcacaagcgaagaaaaagaagcgggagaggcctgagatcgaccacaccaagatcgactatgagccgttccgcaaggaattttacactgaaccctccaaccttgccgatatgaccgaggaggatgtagcaaacttgcggcttgaactggacggcattaaggtccgtggttccggcgtccctaaacctgttcaaaaatggtcgcaatgcggtttgggtgttcagacgttagatgttgttcacaagcttgggtgggaaaccctcacatccatccaagcgcaagcaatccccacgatcatgtccggtcgcgatgtcatcggcgtggcaaaaactggctcaggaaagaccggcgctttcctggttccgatgttcagacatatcaaagaccaacgacccttgtctagtacagatggccccatcagtatgatcctggcgcctacccgcgaattggccacccaaatccataaagactgtaagcctttcttgaaggccctgggtcttcgtgctgtctgcgcgtatggtggagccccgatcaaagatcaaattgccgagctgaaacggggcgcggaaatcattgtatgcactgctggtcgtctcatcgatcttctggccgcaaatcaaggacgggttctcaatctacgccgtgtcacatatgtcgtcttggatgagggggaccgcatgttcgatatgggctttggaccacaagttgtgaagatcatgtcgaacatccgaccagacaggcagactgtccttttttcggcgacgttccctaagagtatggaagcattagcccgcaagactttgaacgagccagtcgagatcacagtgggtggcaggagtgttgttgctccagaaatcacgcaaattgtcgaggtccgtaataaagaccagaagttcgtccgcctgctcgagctcctgggaaatctgtacgaacacgacgcgaatgaagacttccgcacgttgattttcgtcgaccgtcaagaggctgcagatgacttgctcaagcaattgatgtacaagggttatccatgcatgtcgattcacggcggaaaggaccagattgatcgtgacagcacgattcaagaattcaaggctggcgttttccctatcctagtcgccacatcagttgctgctcgtgggttagatgtcaagcagctcaagctagtcgtcaactatgacgcacctaatcacctggaggattatgtccaccgtgccggccgcactggacgggctggcaacaccggaaccgctgtcacgttcgtcaccgaagaccaggatcggtatgcgttggatatctcaaaggctctcaaacaaagtggacagccagtccccgagcctctccaaaagctggttgatgggttcaatgagaaggtgaagtctggcaaggagaagaatttctcacgccatgggttcggtggtaaaggtctggaccgtctcaatatggaacgcgaaactgcgcgacagcgtgagcggaaagcatacaaaaccggtgacgatgacgatgaagatgacaaacttgagacccagcaggagtcagatgatcgattgaacaaggctatttcagctgtccgatccagtgctgacccggctgttgcaccggctgcagcttctatatcgagtgtgccgaaaggcattgatcttgatgggaagattgttgtgcatcgtacggagagagcaccggcgactggttcaaagaacccgctggataaggtggggtctgctgttgcagatattcatgcgcgtttgagccgcgcgggtgtgatgagatcaggcgtgcctattgataaccgtggacctgatgccggagccttccatgcgacgctggaaatcaatgatttcccccgtaagttatcccgtattccttacatctttcagacaattacttaccactttattttatcttgcagaaaaagcacgttgggccgtcacgaaccgcacaaacgtggcaaagatcttggagacatccggaacctctatcactaccaagggcaatttctatcctgccgggaaggaacctgcccccggggagcttcccaagctgtatatcctggtcgagggtgagacggagatttcagtgaccaccgccatacacgagcttcgacgcctgctcaaggaggcgacactggcagcttcggagggtgaggcgcgggctccggtgggtggccgctacactgttctttaggtcataccttagttcatagtagtctcctagatacgttttcgaaacaaatcaatgattgtacgatatgctttgcgtgtctcaattcttgtaaaacctaaagataatgactatattcgtgattactttcatccggcagtggaactggggaacattggctaatcggaatgactgccgaggcattgtcagatcatctaacctaactatcaaagagaagcttgcttccacaattcatccacaaacaacgagccaaagaactgcagcaaaagaaaccagatagttcgctacaaagaagaacaataagctcacaaatacaacgccaaaaaaacaaagcccgggatataatggcagtcgtgatcaaatcaaaacctcgcataggtatgcctattcccatctccttgcagcttcagccccatctacatctcgcgcagccctctctgtgcgactgacttgatccaatgtctgcgcttgagtttgtgccttctgagcagctagctttgagcccaatttccctttattggctaaggcgccttcggcacgtttctgtaacacaacacaagtcagcaatcgtagctctacatagcatatatagagggaaacaagatatcatacctgtgcggcgattgcagcgtttgcacgtgcctcgtccgttccagcagtactactacctgtagtgctttcacccagagtacggccgggtgtagccttccagtttgtcttggccggaagtggggcgcggggtgcggcagttccccctgggttggtgccgactacacggccaggctgattgaaagggtctgcctcattggaagagcgggagcagatgttgcccattgtgattgtgtagtgagtcgtagggatcggagggtatgttgcggttaggctggggttggcgcaagatggagaaggtcgttgtcgttagagctccggctacggtgcggagttgatattcgagtacaccaattgaatgcaggatgtttcgctagggtagaatctgtaggcgctatgctggctgtaaatcaagttgtacgatgttgtgttgttgttcgcaagtcatcgcaagtggatgttggagcattgcgataaggctgatccgatagtcgatccggggtcaaaggcggtgaacagggtccgaaactgattttagtaagtcgggctgtgcattgatgcctagtaggatgcggtgaagctaaatacatggccagctcatagattccatggctgattcaaattgaactttttcatatgtaccgcatgcaaaccgcagacaaagttccccattagggctgttgaatggcaggtcggactatatgggcagaataaagcttagtcacgatctcccttggggaaatcatctccgcatgggaaaggaatttttcatcggaatgctggggaacatttttcgagtctgaactgatctcatgtctctgtttcctgcagttttgcctctgtcttatatccatcataagatttcctgaaattgatcgccaaagcgtgttctgcgattcgctcgaaaatcatgacgcctaacccccaaggtcctcatcctctcctacgtcccgaaggtcctcacggctacactgaggggtctcagtcggcacaacgttatgccccctaaccctctcgaaatcatttgaatttgatcctgcacatctgcgactccaaggtcctcctttttgcttttcctgcacgtcgatctcggtcaattctccgattgcgcctgttcgcaattagtccagtacaagcgcgtgacacgattgcgaaactatctgcactgtgggaggatatcattcggtgctacaacctaaactgtctcctgggagcggcgcacatactgggtggcgctttgactcgtgggttcgtgattttgtagtgggatatcgtacctgacggacattcactgtcccacttacggtcgcacactgctcggttcctcaactgtattttccccatatcgttcgtcttacacactgttgtgacgacagctttcctggccaacccggttcaatttcgctccaacaccttccctctgtcatctgaagtgaaccgtgcaccatggcttccgaaacccaacaaggcgatttctgccttgaatgcaactgggaagcgttccatattgatggcagacctgcggcagatccctcgggtaatgcgtttcaacatcattggaactgttcaagtcatgaaacccagataccgctacccccttgtgaggtcgatgaggcctgctgtgatgtagacgactgcgcgctagactgcgggtccgtatgtggccactttacgggctgtgacacttccactgtctgctcagtcactcattgcgcggatgacaactgtgatgatgataactgcgacgataaccattgcggcgatactcattgtgataccaaccactgcgaagaggatacctgccaggacaaccattgtgaaaatattgaccccctgtgcttcgaagaccactgctgtgaagttaccgcgagtcaagactgcggctttgatgctatgtttggactcaacaaccaactgtcgctagacacgggcgctttcccttcgatggcaatgggaaatcattccgttgggcatacgacaaaagccatgcaacatcctttccctggtctcgtcgatccatttcaacaggaaaacttcctatcctcataccaaacgcatgccacccactgcgagcaggatgtatccaaccacttcgagtgccatgatttccagaaagactggcaggggatgttcgtgtcgcctcctgctcccacacaggccgaagttaacccagccgaggttttccacatgctcggtatgtgctctgacttctcgatatgccaagatcaacacgtacctgggcctcagaccagtgtcgatacctttgagaaacccaaaatcgacacgtcaaatgcattcaattgcttccatcccggacatcatcatgtccacagccatttcaaaaatcccaatgatttcaacctgcaggttatccgcaaaggacctcaccgcaaccatcatcgctgccgagctcacacccatgctcatgctcatgctcacgcccattctcacccgtattccccttattctcgacagtctcgctcaagcatcagctctcacctcatttccagtccgggagaaaccccaccacctctcgaaggcgactcctcatccgtactcaccacaccggacttttctccagccgacagtaagctgcatatctgcaagtggacaacggagattcgcggaatcaaggctgcttgtggtgccacttttgccgactgtggctctctacaagagcatctcgttgcctgtcatatgaataccgtgaatggtgccaagggcaatgggtactactgctgctgggaaggatgtcatcgcccggatgagccattttcgcagaagtccaagcttcaaggtcatttccttacacacagtaactgtacgccatatctttcatctcacgatctaccgagggtaggacaaatgtgctaacacgaatggtatccttctagacaagaatttctcatgctcggtgtgcggcaaggcatttgctagacaagcgacattagaccgacacgagcgcagtcatcgtggcgacaaaccatacaaatgcaaagactgtggtaaatcatttacagacagcagcgaattgagtatgtcgttgtcaaattccttttaggatccaccgctgaccaccccagaaacacattcccgaacccataccggcgagaagcctttcaaatgcacctggccaggatgcaatttcaccacgggcgatgtaagttgtccatctctatgcgatatactggctcatgttctaacatcgaaccagtcttccaatatgtctagtcacaggcttagtatgatacccctgccatctcaaatgtttaatttactgactctgtctagcccacggagagcgaaaacataaatgccttttcccagggtgcactaagagctttacacgtcctggtaagttctgacctgagctctgttcttatcgcctacatgctaacgttaatttctccgtagaccaattgaaacggcaccagaggacaacacataaacaagaagcctgctcgacactcccatcaccgagccccgatcccttcactatgacccccttcactctcgtctaattatcaactcctttgaatgcatatttgaatgcgattgtcatgtcttatgacccaacggatttaggcgctatttgccgccgggcgtactatggaagactgagaaacactgtgtttctggcgttttgtggattttcgagaaccaccaaaaagataccacctggccttgatgttgccaggacttttcaccaaggattttatcgatatattgttttacccctgaaccgatcaaatctttgattggctcaaatgatctatttcctatgtgttcttattatgttatgatttgctttaatgaactcgcatatcaggtatgatattcgcgcatacggaaaatgaagcttgcagactaagatgcatgatgcctttattccttttgctggtgtggaccacaacatacaaagtaccagttaaacattaaatatacaattgccagatatgaaacccatactatcgatgtacctgagtagtgataggccagactttgagcagccatacagccaaacccgctcaatcttcggtagccctctcctcgagcgcctcaacagcattcttcaactcccgaatccgatgtccgacccgccgacgtacttcatccctaacctcctgtgggacctctgccggattagattgggtctcgacagtaggactctcctccgacgtctctgtctcattctcgacttccccaggacgagtaatgtaaaggccgtacacctcggacagctggttgagagcatcgcgggcagattcgcggtctgaagcagcatagatggtagacgagtcagtgctctcggtagcaatttcaaactcgtcttttgcgacttcgtatagctcttgtagttcctcgaccaggatatcggcttcggctttgcctgtggatccttttcggtcggcgtaggtcctcactgtgggtttgacaagcgatgattgaagagaacatgatgattggaatgagcttaggctcagtcgtattttcctagaactggacaggctgtgcaaagaccgaggaacgagatgcagtcgctgtacgaagggtcggttgatgtggtgcgattgtagacctccaaggcgcaggattgaggagccacgcgcagatcgaatgcatagttgggcagacatctcgaaaataggggcgaatgaattaaaaaaaaggtaaggtgtactcggtaaatgattttaagaaaggagctgatcgtaagatcggtgatgacgtcgccagctgtttatcgcatcacgtgccgatacagatctcaggggtggtaataaacataggggattgtgaccgtatgcatgcatcagaccgacgaaggcatcattttattaattttatgagttcattgcgacaattgccttttttttcttggtcttattcctttcttactactatgcctatacgcctacacggagtatgaccaacatagaaatctaaaaagcggaagcatcgtgaacctccctaagcttctgtagagaatcccgatcccgaaattgagaaagaagccgaaaaggttcagcctagtccagttggcaatgaatcttaaacaatcatcacaatcttcgccaatgccccattttcctccatcaaccgatgggcctccacaattttctccatcggaaaggtcttgattggcaagtgaatcttgcctgtcaccagatcccgagcgatctcctcaatgggcgttttcagtactgcctccgtggtactcgtataggtggtcagcttaacagaggtcggtatcgaccccatgggcgtgaactggtcaaaggtccatttgttcccagctatacccgtcatacaaacagtaccaccaggcgccgcacattgcagagagtcgtttagcgtggttaccccaaccagttcaaggattttcccaaacggagcacgtttctggacctcagccaatatcgatcccccgtcgataatgacgtcgtcaataccaagaccacgtaagaactctacgcgtgctggattccgtgttgttacagtgacagagattccatgcaatcgagcgagggccgcagctgccaaccccacgctggtagttccgccgcggaccaacaagcggtcactgggagatagcgcgagactggtgaacagggaaccccaagccgtctgcataagttcaggaagagcgcccaagatatcccaaggcacgggccgatcggggccaaaggcagcggtggcatcgacgcgtcgtacttggtctaccggcacagccgtgtattcggcatatccgccatcgaaggatcggcccatgccgcccattgcagtgacgacgacctcgccagctttgaagcctgaatccagggcctcatcgacgattcctgtagcttcgatgcccagaatacgcgggaatgtcacaccgggtgaatcaccttgacgcgtgaatacttccgatcgattgagcccaaaggacttgatgcgtatgcgcacctctccctctgtgggtgttggctttggaaccgtttgaagtttcaacacctcagggccacctatattgtgcatcacaatagctcgcatgtcgaaggacgtgtttgcgtcagcggtaggattgatgatatccgtggtgttatggtgtgtcactggtgagagtcaaaggtacgaaacgaggataacagttgcaatcgcagcaagaagaagccaggaagttcacgtctacgagcaaatatcgggacataaacttaccaatacaacatagatagtgatatcacatggcgtcatttactccttccacggaaagcttctttctttatgtaagcaagatcccctcaggtgccgagtgagcgcgatacacgtcgacattcggagtagtcgacgtttggcccggtggaattccgatcacgcaccaatcaccaatcacagcgtctgggttgcagattccagggtgataatgcagtttacttttcagtgaaatgttcatttactagtcggttctgattgaatatatggcctactgagcaagatgaatggcggtcagtggtatttatgcttcagatgtagctgggtcaacgatccggccatatcaagaactcccgtgctggaggtagagtcggagtagaccaataacggaagagcgggccgaccggcccgtgccgccccaattgcggaatgcaagtctcggaggccatgttattccataccggcccttcatcacttatgaatctcattcaaactctcattcaatagagatcgtatgagccacactgctgttggctaggacaggagatacggtcacgcaaccgttttcaatttcttctagcagccttcgaccccaacgcagagagcaacttccattgcgagaaacggattgcgattggtttagctaggttcacggctattcttactgaggttggtgaattttctgggaaagggccaatgcttgctggctaacgagcttcaatgctgtgcagtacggctttttttgtcattccttcaattccaagttgttcttagtggcggtgcctactagatccaacagccctatacttattgattctagatgtggttttgcactttgaaactggagtctgacacagtatggctgaatctgaaggctctgtatagatgtgacgctaatgcttgaagtctatcccacgatccacctatgccatgccgccattcacgcgcagaacctgtcctgagacccagccactagctggggagctgaaaaacgccatgacctccccaatctcctcgggtttagctaagcgtcctagcgggctaagatttttcatggcatttagcaccggttctggcttgcctcgcgtgaataggacggtgtcggtcggacccggggcgacggcgttgatggtgatttctctggggcccagctccttagccagaactcggaccatctgttcgatggcacctttcgtggtcaagtaaaggagatagggaggcgtgactgtggaggcgtgacaaagagtcgtggaaaccaggatgattcgaccaccgggacggagatgaggcactgctttctacaatcaaccatcagcagcaaagaacttttttttgtatcttctgcaggtgggttgtctgcaatctgcatgtcgtacctgaaccaaaaagtagggtcccttcacattcagatcaatactgtcgttgaagtcttgctccgaggtgtttgccaggtcatggaggggcaaggaaccggcgttggcaatgacaatgtcaatttgaccaaacttctccactgtacgacggatcagctcctcgctgttgagcacacaactggcatttcccttgatagccagggcgttctgctctccaatttggctcaccacctcctgggcgctttgctcattggagcgatactggataaccaccttggcaccatcgcgcgcaagacgaagagctgtcgccttgccaataccattagagccaccggtgattatggcaacctttccagtgagagcagccataacttcggttgatgatagataggggataacgaattaggacgacaggaaaggtgaacagaaacgacatttcaagtgcttgttttgcgcgagaggagaaataatgcttcatcttgacggtgttacatcatgctgacggtgttggtatacggcgtacatgagtttatcgacggtccatccgcctctgtgaagacgtagagtgatgcaatgagcagcgcagagataacacgcaggagctagtagagatccatcgatctctccactcgaatggaaggaacatccaactgggattcgagtgtgttcaacgcgtcaccgaccggctcttacctcctggcaaagcttcaccaacagatgaagtatccatgccggcgagagcgcgattgagatgctctttgcgtataatcgatttataatagtcagaatcagtgcagacaaatatacccaatcttacgggattactaaaaagagaaagaatcgcgcgccaagcatccaaaattatctgtattgagtcattcttcgaaaatggtctggctaggtaatctattaatttaatctagtatgtagagctaaacatctcggccaagtttgttctttctccaacgcgacttacccttgaaggcctcatcaatctccccaaaggtccgacctttcgtttcatgcatgaagaggacgccaacaatgacggtaataacacagcatccaccgaacagaaagtacacaccgaagctgctcttcgcaaggagaacaggtgtcgtcaaagccaccaagaagttgcacacccagttgctcgaatgagctaatgtggtagctgatgctcgtgttcgctggggctgaatctcggcactatagactttgacggagataccccaggtgacggagtaaagagcggaaaagaggtagatgcagacaatcaccacccagcgaccgacgccagtagatttgtggacggcatttccagcataaagaccgcccatcaagaacatcaagatccccattacaaccccaccgtagataatgctgcttcggcggccccatttatcggcatagattagtcccgggatggtgacagcgaatatcacaagcgctgacacaccagaggccaaaaagcttgcttccgaagaggcaagaccggccttttgaaacaattggggggcatactagagttcaagtcaaccactgtcagttgtatcgaggtatggaaagggtttgagcctacataaaggacaccatcaataccactcagctgctgcatccccatcaaaaagactgcaaggatggtccggcctaaaacgtctttggagaagatggcaagaagcttatccaccgttccctctttgggcttctcgatttcagtttcaacctcctgtgtccgtacttgcagaacgaccttttcgcgctctgcgcgactgacacccaacttgtcccacgcctcttcagccatcgcatagcgaccatgaagtcctagccactgaggcgactctggtaagtaaaggagtgaaagtccacacatgaccatggagaaagctgcaagaaggataaacggcgtgcgccatgccagtgacgagtggaggcttgaggttccataactgatgaagtaccccatgaccaatccgagagtaatggccagttgagggcctgttgtcagtgcgcctctggtgctagttggtgagatttcacaaatcaggacgacaagatttccaaggaaaagtccttctcccaggccctccacgacacggccaacgatgaacatggatagggcaacggctccggcttctattgcggctcccacgccgaatatgaaaacgccgatgcagatccctttcggccgaccaagccgatcggcgacatagccagcgaagaaagacgagagtgctgctggaatcaagatacatgagacgatgaggccgtgaatcgtggagttttgactaccaaatgactttttgaagtccttcatgtcggtcaccgggccgatgataccggtatccatcccgaagaggattccgttcgctgagcatagaatgcatgccagcatatatttcggtggatttctgaactgggaaggaattaatcccattacttcggcttcggcttttggtgtttgacaggctgaagatatttttcggctcgggttgtgggaagtggaaagaagaaacgaaaactcttacccctctagacccccacgtagggcagtcatcattatccattgggtacatcgtataaaatgccgttacatgcatatatcatatccatcattgctcactaggtatctgtcagaattgaccaactgtagggacttgccagtattatatattctgcaaaaaaatgtgtccccagggctagacggagaagctttatccgggattgtatttgagctcttcgctgaatcggcgtgtgagaggccgaagcttttgtgggccatcgcttctatctcggggtatctcctggggttttcccctcgtttctgacgttttatggggcttccggggtacatttcacattaccatccgcttttcgatatacatatgttccctcatcaatgtgatggagagtggtttgttccattctggacactcgaagaatcgagccaatcatcactctctagcctttcaacaaaattattcgtcgaggaatccggcagatcccgattcacctctcgctctctgctgtggcagataatcgctatcttcgcactgctcccgccagagggtcctttcctcagacagattgacggagttcgtgtttcccttcagcgttccattgacatgcttgcgccagatagccttgaaggacggcacatttgctgccgtgacagcgacgttcagctcaactgctgagataatgatcattttgccgaggacatagatgaaatccgggtttactgcgaactcatgaaggatgatgatacgggccttatggggaaggcaaggattttaaagtccatgaggatgcactaatgatggatagattagctacatgctctatttcctgcagtttgaatttccttggagactcgccagtgcaacaggaacgtagtaggttaccgatgttgacaggcacgtaacatctgggtatgctgctgaattccaaaaagctgctaggggaatgtattggaaacaataaagcagccgtatggagatggagaccaagacattcagtacaatggtcccgtagacaccttagatgaaggtagtgttgttgatgagtcggagatagaagaccaagaaccccgtcttgatgcatccaaatatatacgatctccgctgcaaagagaagctgtgaggttagaacgaaaccgacaaagggaaagggtttccaggcatacctgtgtcaaaatcaatatatctttggatcaggtatccacccccatagcgaagaaaagtataaaacagcccttgttgtgctgtgttgtaaacctacacacgctattcgttgtcattcttcatgatacaatggaaactaccatcacgaccatccaccaatgatcctttccaaaagatgataatctagccccgcgaataaatgcgcaagcaagctgagaaggtattgatcgcccacgtatgcccacaaaaggaaggaaatggcgtatgcggctggctgaaacgactcaaacattttcacaacatataccgccagcgcggcatagccggagccctaaacccgttgtagcgtgaaagatcgccggttctgcagcgtccccacagcatctagcctaacagaccaatacttttcctttgttttggaattgacatgtttattcagcccgatggtggatggtggatggtgatggtggggaacacgtattcggtactcagggctcagccagcctccgaacagctggacgtcttatcataaccatatgatacgggcaactgatttcgaaaaaagaggcgtacctgacagtcgccaggtctttctccgaccccttaagagctacattgttctgtctacccctggttaaagaaagcccgaccccagaaatactgaaaaacggaaaggaactccttcaggacggacagccagcgaatttggaaaagatggccgtggcaacgagcctggcggtacttctgagtccagcgcctttacggattgcacctacctttctggtgttgggagccgcatttcaccagttcattcgtccatacgaaattgacaacaatatcttttcccttgcggccttatatctgggaaatatattagccctatgcgctgcctggacttatgcctactctctaagcgtaccacgtgcgatcggatgcacactactggccgcatgctacttcaacgtcggactgacagtcagtatcctggtctatcgagccttcttccaccgcctcagaaaatttccgggtccatggacagccaagttgagtcggctgtcggcagttaatcgggcgatcaaacggacacagcaccaccgggaccttcaagaaatgcacgaaaagtatggcgacttcgttcgcacggggccccgtgagatctcgatcaaccggccatcggccgtggtcgcggtcaatggttcacattcgccctgcacaaaagctccctggtatagccatgtgtccgacgatagttcaaagatctctttgaactcgactcgtgatcccaatatacaccgtcgtaggcggaaggcatgggaccgtggatttagcatgaaaggtatgagtttcaaccgataagtcctctatcttctatcttgtactgtctcaaacgtggtagctgatatacataatagccatatcattgtacgagccgattgttcaaaacaaggttaatgttcttgctactcagatccggtcccgacttaatcaaccgctcgacgccgcacagtggacgatgttccttgcgtttgatgtgatgggtttggttggattttctcaagactttcaccagctggaaaacggcaccgagcagcctgctgtcaaggagctccaccagcaattgttgtatattggcattttgaaacccgcgccgtggattctgaccattcttggaggcatccaagggttagtgggtgactacggtcggttcatgacttactgcgccgacaggattgcggacacgaagaaggtaagttttacccgccacttatatagctgttccgccatggttgctttttccttgtcgggagtgaccttctgacgtacgactacagagatggaactcgagaagcgataaagacagtgaaaaactccccaaggacgtcatctcctggctcctcaaggccattgaggagaaagaccctagcgccccgccaggcgatcaagcgcttaacgaagatggccgtctcatgatcatcgctggaaggtccggcaaccattctccacaacccactgtaaaagaaactaacttatcttcagtgacaccaccggcacaaccctagcccacgccctctactttctggctaagacccctactgcatacaagaaactgcaaaaggaactgtctgacgtctttggaaaagccgcggagccttcgcagtttactaacagcaagcttcagaacctcccttatctcgaagctgtcatcaacgagaccctccgcctcaagcccgctgtgccaagtggtcagcctaggttaaccccacccgaaggtctacagattgacgaggtctggatcccaggtaacacgatcgtcgtgcttccgcagtatgtcctccatcgcgacgagcgctatttcccctccagcttggaattcattcctgagcggtggttggatgagaagaacaacttggtcaagcacgaggaagctttcttcccattccaattaggtcgatacggctgcgtcgggaaacaatttgcgctcatggaacttcgagccgttatcgcacgggtggcatacaatttcgatctcgcgttcgcacctggggagactggagtgtcgtttgacgatgattctaaggatacgttcacttttagtattgggtctttgcctttagttttcaccgagcgatcagaatagaggagtggtattcgacaggccttcttgaaattgagatttttttcattatgttaaaggacaaaggtagcgtcacttagttatcataagcctttgttgttcgaatggtgcgacaatgagatccacgacaatttctttcatatactgtgaacaatggcgtttgtcccagtatttattctttgaatcaaatcgaataagtgccgactcccatatagcataaatactgttaatatccacaagtatctaccaagcaaacatttggattaccttccatttcccccagatgcttcaatcttccctgtaccggatcgtgcgaattttcttagttactcttgacttctggttcaacaccgatctccccgaaagccaagttcaaaggagcgataagccctcccaatcaattccatctgacctgaattcttcatctagtgcccaacaagccgaaaggtcatcttctaatttcgaaatgaaaacctgggaggaaatataccaagaggagtgccttagtttcaaagccagtctggagacccaagctcggattttaagaaacgatccggaaagtcaaggagtggatcgtatcaatgatgttcgcaaagagctaatatcactttcgcaccaggcagagcgaatcaaagaggctgcctttgaaatggtcgacgagaccccggacagtgtatatgtccgcaatgccacccccgagtggctctcctcccgatttggagatccgcagctagaacaggtatgtattagcatggaatacagcttggaccgactggcatttgagcttagatctgatccgtcaatggaccttatggtcgccggacaccttgagcaaatgaccgacgatattgagatggattttctttagataaaaatgcatttattcatttgtggcctctatggatctacaaaattgtaataaacgagaatactcactaatagtcgggcccagtatgcggctgtaggaattaagctgagaagagatgataacttgcaattaggtataacatatgtgcaagtcttgtatctataaataaggaaagcgaaagttgtaaaaagcaattgccattctgctatgatgttcttcttaattttccagtgactttccaagtcctgacccaatccatcattaatgagcgtatacagttcgtgtcgtcatgtcttttctccaagaaagccgatttttcagtccactgtcatttccaccaagtccagcatcaaatcaatcccactctgaatgcaccgaatatgaaatttactcctgctgaccagtgatggccttgatatccttgttctgggccttgttttggtcgttggtggggtagttctggtaagagccgtagttcttgtagtttccgtagctctggtacttgctgttctgggagctgggagtaacctgagcgttgttggcggagttcaggttgttgttatcattgggttcgttgcgtgaggccacggaggggatagaatggcgcttttggtttgcgtgccactggccattggcatcggtccaaccattctggtcattctgaccattttggttgttggcgtgccattgaccatttccgtcagtccagccattctggtcgttctggttgttggcgtgccatttgccgttggcatcagtccagccattttggttgttttgttggccgttctggctgtattgaccgttttggttgttgtcgcgccactggccgtcatgctcaacttggccagtctgattggtttgattgtggcggttatcgccgttgttggcgacgaacacgccatgctgccactggccttttcggtactgtccactcgggtcccattgaccggccacgtcgttggggtccacgggaagtgcgaggacagatagaggggagacagccaaaagaagaaggcttttgatgattgaggagcgcatcttgaaggaaggtgaactagaagagattcaaacgaaatatgaacggtttttgcttcaggggtgctgttgcgatcctaaggttctcgagattgtttgtgttaaatggcgattgaaacccggttagtcgggctgtatttatatctgagaaatttcacctccatgaattatgtagctcaaaagtgctactcaatagctttggaagcctttgacaagaatgtctgaggttggctcacgccattcctcggtgtggtttgatgcgaattggcgctgtaagggacacggggaaacgtgtagttgataaccatgctgccttgcgggggataagcgaacggatgcgcgatgatctcagtcagctgtaaaagatggagtagcacgcggaaagcagagcacaacaataaagattaaacctttgagtggatacatgaagagttgcatgatacctcgcgtgagtctgccaaaaaagaattcgtggatcttgtccgcaagggggtagtaatcacattcctcgacgatcacccgcggtcaaatagtcctcatcctgtctggctagacgaacaaagtacacttacgccatttcaatgcatatgatgttgtcttgtatgtggttgatgatcccttgaggggattgtcatcttaaacatataccacgcattgggactcatgggatggcgaaacttgtgagacatgcagagaacacgttgctttgatcagcaatggctacgacctcgaaggcttcgagttgatgtcagtattgaagctgagcaaagtccgctgcgtgaagttgcggtctggggttggcgtctgctagttacagaagccaaggctgttctattgccccttgaatggaatgatcgaaaatcagttttgcgcagttttgctctgcaacatttagcaaactactcacatcattacaatggactctatcttcgacaagaattgtcatggggactattctaggcgagagtccggtgagggacttctcgcagaggaagaaggcactctctggaatagaaaggaaacaccaacgccaacgtgtaacagcttcgcggtgtgtctgtttcagctgagtgcacttgtgctggtattcttagtcgggactctgttcggctttcactggcgtggtgatttggatggcctttgcagtcgacatgtttctcaatattgtaagagttccaagcttctatggtgcaactcattaatcttattgagatacagcaactgtcatgaaggaagttggaattcaatatagtctgcaagaattcaatggctctctactgaaagagaatgtttttcgacaagatgctggcccagatgttgacgcagcatgggagtcgttgggcgtcaactgtatgtcccaaagtgattaactgctttctggcatgggctaattagaatcatgatctaagaccgcagcattcgagtaccaccagaggatgctgaaaaatctggacttgctaacgaccaagtcaagatcaatgcgaagtatgggggaggatttcctgcgaatgtcgagggcttgcatcaccttcactgtctggtaagtggtctagacctcgacctatgtctgtgaagatgctatactaataccgacaagaatctcctccgtcagtcgctctactataactatgactactaccacgccaagggggaagggcccttcacgaacaatgactatatcctccgccgccacgtgtgtatgttgtgcccattattcctttctcgataagattttgaactaattattctctcatcgcagcacattgcctcgatattgttcggcaagagctcatgtgcacagttgacagcggagtgctgggtcaagtctggatttaccccgagaacccggagccctatgttgacttcaacactcagcatcgatgtaaaaacttcgatgccgttcgtcgctgggccgaggacaaccagcttcctcaggaccccccttcagactttttgcagccgccatcagagggagaccgaatctatatccaaatgccatgagacatgacaagcaatatttgagctagactcagacagtatacaatagaatggaaagaataaacctcagcataggtgataacaccaatagaacaaaaattcgctcaattcaatcaagattataaacactcaagtcatcactcatccccggcaaaacatacacagcattatcctcgcccccaaaaactttcaaaggcctcactcccctaaactccatcccaatcttctccaaagcgccgcgactccgctgattcgtaggcgagcaaaatccaaacacagcatccaccccaagagacttctttgcatactccaaaagaccctttgccgcctcggtcgcatacccctttcgaccttcttcgggcaacatggcaaacccgatatctggggcaagataatgtgggcctggtggaatgcccctcgtgagcgatacgctgccgatcggcttcaccccatcatcggtctgtcgcgagactaggaacatgccatagccatggtaggcgtagtgttccgagactctgccttggaggaatgaatatgccttttccggggtggtgattccagttttgccgcaggagctgatgaaatcgtctgtattccagagttgaactaagaaggcgcagtgggtcgggtcggtggggttgaaggggctgatttggagacgcggggtggaaatcgtgaagcccggtgggaaggagaattcgggcattgtggcttggtagttggattataccagatttgattatagaatgaagtaaagtgtgtattttcttctccttagcacgatagaattaccagtgagtcacagttgaggctggattcaaaggaagcttagcgccgacaggggttgacggcccatttaggtatgtggcgttctggctatgagctagaaagatagagagaagagatagggacaaaaatctgatagacgaggtttaacgacaagaaccttttcgcacattatcctattgtcccatcttcatgccaccgttggcacataccacactgccagtacaccagagagcatcaggcgtacacaacatgccaacaacacccgcaacctcatcagtgaaagccggtcgacgaccacccatcttctcctgaattaactgcttctgctcatcagtcaagcgactcacagtgtccccgtgatccgtcagcttgctcataggcgtgttatcctggtatccttggatatccttccagaactgctctccggccttgaagtacatatcaccgacgaccgggccggggttaaccgcattgacggtcgcacgttcggacagttcacgtgcccaggtgcgagtcatcgcctcaacggctgctttggtaccgccatagatcgactggcctatgaaacccagcgacgaggatacactggagatgctcacgatgcggccgcttcggtcggttgggaggaatggggcgcatgcctgtgtgaggaggagcggggcgaggacattgatcgcgtaatgccagttgaagtgctcggcctcgatggggcccctattggcgtcgttcagggtccggtcttgcgatacgccagcattattgatcaggatgtcgatctggagttttccatcggtgctgaaatgctgctgcgcggtagcgatgattgctttcacggcttcggtaggctggcttaggtcggcttgcaagctctcgcatttgatgttataggttttggctaaaaaggagcacagttcttcggtgtgggcgcgcgaggactccgaagtaaagatcagaagtaatgagcagccctttgcagccaggttacgggcaattgcttcgccaattcctgcgaaggtggcgtgttagcttggtctcttggtatgcgggggagctaggctttaccccgcgatcctccagtgacgatgccgaatttcccttcaagtactcgagccattttggatatcaatgagagatatcaatgagagagatgaagaaataagtaaaacgaatttgattgagggaggacatggccaactctttaacctctcttttcttatttagccgagttaccccatccctccccttcccacggaataaaattgcccgttgcagaatgacggaggaaatgcgtgtaattcgggtaaattcaatgtcggcccgaatggtcgactgtggagtttgttgtttgttatgttggcatggtttgcatcatttgcactgtttggaatataatatcgactccatctttcccttaccactcactcattgctagatttctgaattgaatatactcttttgctttacaagagccggctagtaacaacactgcctttgttgtaagagtatacagtctatctcagtctatctctagtggtcaatcctcccattgacactataaagttacgataggtacattgaggggttaaagcgctagcccgattaggccggttatcgcgatagtcccctgaaatggtgtttgacccggcgctcggtactgtagagcacctcgagtttgtgtttctacatctttcgggggctatccatagtgccctggcagtcctcgaagtcatctaatcatgtcacccttcaccgtgccacccggcgaccagagcgtccaggttcgaatcatcgattcgactactaggattggcaaattaccactggcgtttctcatggaacctccgatggaggggatgcattatatgcatccacttccggcctggtcgttcctgatcgagcatccttccggtcaaaagattctctatgatcttggagttccgaaagatttgaactcgtttgcgccggtaatttgtaaacatctcgagacgcagggatgggaagttgatgtcaaggaagaagtgatcgatactctcgataaaaatggtatcgcggcgaatgagatttccgctatcatctggaggtaagtaccttattcgttgattgataagtatacaaacatcgtaacgtgctgacggtttcgcgggaagtcactggcactgggatcatatcggtgacccatcgcggtttccttcctctaccgatctcatcgtcggccctggtttcaaggctgctttccttcccggttatccagcgaatccaggtgctcctgtacgtgaaagtgactttgcgtaagtcttcgattggcgttgtcatttattagttggtatataattgaacttgccccatccgctaaccttcatcccacgaaagtggacgaaatctacgggaattagacttctctgactctgtccaagttggccagttccgagctgtggatttcttcggtgatggttcattttatatcatagacagtccgggtcacgcagtcggtcaccttggtgcattggcacgtaccacgactaatcccgatacattcatcttcatgggaggtgacctctgccaccacagtggggaaatcaggccatccaagtatctccccattcctcgtgatattcacccaagcttccctactcccagctcacttccatgtcccgggcacctggtatacgaggagttgctagtccgacggactggatcggtggacaagccattctttcgaccagccatgggaccagatattgaacagacaatagacacaatcgataaagcacaggtggccgatgcagatagcaatatctggtttatttatgctcatgatcgcagcctgttgaaatgtgtggatctgtttcccttgccggctaataattggaaggaaaagaattggcgggagaaaacactgtggactttccttgaagagtttggaacggcgatcaagcagatttgaatgacatgaaattgagcatgttgatactcgcatgtaactacatcctattagatcggtgtctcatgccaggagactagaatcaacgtcccctttaatcttaatttacgctttgctgacctgtcgtcacggacaatcttgttcaaaactgtttctaataatacaagcctctagttataaccacgtgcatatctccacaacagatggcgtagtatatatttctgcggagcgcccaagccgcaaactatttcgggccacggagtagactcgtggtgattatgcaggagcaagagccaccggcgctagatccataagcttcattagcaagcaacaaacctgacgcaagccaacgtcaccagtaaggcgcctcgactaagcctgtcgaatcttttactccgtagggctcggacgacctgcataaccacccctcccctcaaccccacaagctcgtgctagcttacggatactagccgccccgctgagttggagccttcagcatgcaggggctctcgtaaaaagcctcgtgatgactgcccttatgactagttgcatcatttccgaccggggtcgacccctgggcgcttccattaaggggctcatgacccagcttttcatgcaaaattagcaatgtcatctgcatatttttggtttgcagcgttatcagctcggccccaaattggaggtcaaggtccatgccgctggtttttatttactgtatattttcaactgtttccctgtctgcacgattatagcgttcccatatcaaaaactcgatgagatagggcaggtgcacagatttccgtggaaattatattctagttacccaggagggagcgcaaacttggacaaaatgtgtttcttcaaactcaatagaacaatgtgattcctatgaaatgtaacgcactcaaatgatatctcgctataggccaaaaacttcccgccggttctgatcaattggacttattccgcttctgtatgcgcctgcttctacgtctcccagtatcttgagtcccttgatcaggaagaaccgatttgttggttaaattatccactgcgggcctggaccttgatatctccggcttgagagttgcggaaacctttcgtcttgctttcttcgggccaacacgagcggccgcccgtttcctcttagtagttctttggccactgtttgaagcgggaccatctacttcagcggggccatctgcttgggcgggaccatctgcttgggcgggaccatctgcttgagcggggccatctgcttgatcgggaccatctgcttgggtgggaccatctgcttgggtagagaaaagcccatcaaaaagcggaggtctaggttgttgattgaaggtaacatgctcgctaggcactgtcgggctcggactcaaatcgcggtcgttatcgggtatctgcaaagggatttcatgcttccaaaccatcccaggcaatatgccccatttgtcgttccaaatgcctcttttgatccagatacttttcacatgctcgtaagcttcggtgttgatgtttgtcaaggcagagacagaagggctatctggggagtcggaggcattttgaactcgttcgcgctccttcgatatttgatagatgaattgatgaaatgggcgtgatggctcgtccccgggcttctgtttggctttccgctcaccgctgtggggtatccttttgtcccagaatccggccttcgtcggttcctctcccctcgaccgagagagtcgatcgagatcgattttgggcgcaggagtaacctcgggcaattcttcatgcctccacatccaccatggctgaggtacgtgctcccattcttcgttccagattccttgtttcatccagttcttcttgactgtctcatgggcgagattgttcatatttgtcccgtcggggacatccaatgttcggttctcgattccctcgattatgcgagcttccagttcgtagacctgggcgtcaaattgcctattggctcgtgaagcatcttgggccttcatcacttgccatttctcgcgatcacggcgttctagcctctcgcgtttatacatcgttgaggggctatcggggcttagggatgctgttgaattgtgcgaatggtgggaaatgtatgaaacgtctctgtcgaaacgtgatcgctcaatatcaagtcgcctcgggtttttaacaaggttttcgagcgcggtgtggatagtagttagaccggatctaatgctagtatcggccatactgaggggattggtagaataaaatagaaaagggagtgagagggaaataggagatgggggggatgtgacagaatctagtgtgacgtgagcgctaagctgcagtaactagcgcgggaatcgacctcgctctatattcactgaacaatcatatccaatcatttaccgcccaacattcgacgcctttttactattttcgtacagtatcagtctacttttattcgctgaaacgatcactgaaacgaacagcccccaatattaccagggtatagcggttgggcacacttttgtactcgatgccaaataatacataatgtcttccatcctccttccgagtgtctcttctccgtttgatagttgtcccctgtttgaccttgcttccttgcttcaatatgtcgtcattcccacaccctcatcgccttgctctcttctccctccggcctctgaacgaacgagccaagaatgtcgccagccatcctgggaacaaacacctaacgtcgaagttgaacgatggtacaattgtccttgatattggcttccatattcggtcacggtcccgtcacacaattgcaacactaggacgtggtggagatgcggacctctttatcgagggcttcaacatttccaagatccagtgctcttttgaaatcgagccgaacaccaatgtcatcatgctctacgacaggtctcatggccagacaactcaagtttttggtcacaatgctacgccatttgagcatgggcgcgttcgtcaggtagtcgttcagaagaatctgaacgatgttctggggatgggcggcaaaatgcaagatgtctttagattccagttgctttggcatgaaaatacttgtctaacgacggagagaataaaagaactagagtccatcctagatgaccatgtggaaaacccgcgcctggctcggacagttgatgatttggaaacggttttaccgtctcagatgcagaccagaatccacaccgccggccctctacagctgaagatgcgatacacgaagattgaccgactaggatctggacagttcggagttgtatataaggctatcgatgtcgacacgggtaagcttcttgctgttaagatacttcaacagcccgagcaagctttggatgaggagtggagaaagtcattgtattatgcattgaagcgcgaggtcgaggcattgtcccaaattagccacgttagtaagccttccattctcagacactgaaactgaactgacgctgccctagccacatgtcgtcgattttatcacctcgcaaggctgggacggaccggcggcggagatattcatgggtctcaaggacggtgcacttagctccttggttctcaagggtgactttatgtccgtacacgacctcgccaaatgcgtctgccaccagatgcttcaggcgctagattgtctagccgtcaatggagttgttcaccgagatgtgaaacccgaaaacattctttacactgcactaccgaatgcgcaatatcgattctatcttggtgatttcggtctatgcaaccgcactgttagtgctcatagctctgttgggaccccattatacacggctcccgaggtctgtcaaagtggagcccagacacacaaaatggatgtctggtccctttttgtaacaatcgcatggatactagacttcgatggatttcgccagaacttacagcatatatccctttggcaggcccaacaagctctcctagccataacatcaaagattggagatattcaagagatggcgagagtcgatccgggcgagcgtgcctccgcggcacagatgctggtcaagcgctttggtggagaaggcctttcaactcaactcaatcaaattccaccactcagtccaacaaaaccggtacccaaacctgaggctgagttaaatgtcaaaaaatatggaccagcccacagttcacgaaaggttccaaaacaacccacaaatctgacccgcgcccgtcagcctagtaatccgcaggctcgagtattgaggccaagaaccatagatcgccttttgacgaagaagcatgagcttctctcccatgttgttgaatcccctgggtttcgtgtgcggcggccatataaacattagagtatgcggcgaagccgggggagcctagggttgtcggtccacttaactatcagaatgcttcttctttatttcttcgatactttcttgcggatactcagttcgcgttttgccgcttcatctgctcattataattacttatgcaatgcactttgtttcttcttaaatttaccactttccttctatcgtagtcctccatacaaagtaaaatatatgctacccgactttccccgatttgacctcaggcacagatattaggtatgcacttcgccgcagaactcagcgcgttagcaacaaccgtcagcgaaaaacacccaaccgtaactgctacgcgaactggcagtagcagatgaactagccaaattgatccgcgggatagattctacatggccagaaatatactcgaaatctggccgtctacaggagcaactacaaaagaaataaatgttgacgcatagcttcgattgttgaagtactacaccgtcgcaatcggcccatggaggcccacacaccagaataaggtatcaagaataaaatccatcacgcagtgttgaatgcaagaccatcccaggtcatcccacgccaaaacaaaaacattagaaacacaccaaccccggtgtaggccactttttatgccgttgaaggacaaccacttttgagttctaagttgatggagaactcatatgccaatcataacatcgtcgaatcatgttgaaagtctatttcccaagagtatcatcgaacgcagttgaaaatgtaaagaaattagtaacggtagatctcgggcttgtaggggccgttgacgtccaagctgaggtagtcggcctggacgggggtcagctcagtgagcttggcgttaacgtgctccaagtggcagcgagcgacctgctcgtcgagctgcttgggcagaacgtagacaccgacgggcttgcggccactggcaccgaactcgatgtacttcttgccgaaggcggtatcctcggccttgaagagggcaatctgggccaagacctggttggagaaagagcaggacatgacgaaggaagagtggccggtagcacagccaaggttgacaagacgaccctcggcgaggagaatgatgttcttgccgttaaggttgtaacggtcaacctggggcttaatgttctggacggactgagcgttggccttcaaccaggcgacgtcaatctcgatatcgaagtgaccaatgtctagatgatagttagtaacgctcataccaacattttggctcagaacaacttactgcagacaatggcgtcgttgcgcatggcctcgaagtgacggccaacaaggatatcacggcaaccagtggtggtgacaaagatctgaccaacaggggcagcagcctccatggtgttaacctcgtaaccctggacggcagcctggagggcgttgatggggtcgacctcagtgacaatgacacgggcacccatggagtggagagcctgggcacaacccttgccgacatcaccgtaaccggcaacgacagcgatcttaccagcgatcatgacatcggtagcacgcttgataccatcaatgagggactcacggcagccgtaaaggttgtcgaacttggacttggtgacacagtcgttcacgttgatggcgggaaccttgagtgtgttgtccttgagcatcttgtacaggtggtggacaccggtggtggtctcctcggagacaccgaagcagtcctcgagcatctcggggtacttagtgtggacgagggaggtgagatcaccaccgtcatcgaggatgaggttgagcttcttgccatccttgaaggcctggagctgctggtccaagcaccactggtactcctcctcggtctcacccttccaggcgaagctgtaaaaaaataatcagacaatagtccacaaaaggcgcaggaggatttgtgaaagaatgtaaacttacacagggacaccaccggcagcaatggcggcagcggcgtgatcctgggtggagaagatgttgcaagaagtccaggtgacctcagcaccgaggtgagtgagggtctcaatgaggacggcggtctgaatggctaaaggagcggtcagcgcaggccttgctttttatgatagatcagatcaacatactcatgtgaagacaaccggcgatacgggcacccttgaggggctggtcggcaccgtacttctcacggatggccatgagaccgggcatctcaatctcggagagctcgatctcgcggcgaccgaacgcggcgagggactaggaaatggtcaatgattgaaggaggaaaaagttaattgagagacatacgaggtcagcgaccttgaacttctgtgcgggagcagccattatgtgatatatgtattcaaaaactgctgattgttagtgagaagatcggaattgcaggcgtaggaattgactgaccaaagggtgtatgaatgagaaaggaagaggaaagagggaaaaggagaatagaggggaaggaaaactctctaagagatccaccaaggtcccggaacgtggcaagtactcactacttacttacggtatgctttaacgtgtatagctaggtaccagatacttctcaactttctttctatctccgtagtgggctgactgatggcggggtgctgcttagtcagaatcgcaggctggacgtggcatctattaaggtcacgtggcgagatcttgtaaacaagctcttcttctacggtggttagctagtgcatcatggtgaggaccacaccttcttatatcgcaaactgcattcctgtttgaatacaccaatttgagtctcaaaacttcatgcaaaatacatgaacaaatatatcggcgtatcctaattaggactagtgcgattgagttacttgggaaacaacttcccaaggttggaaaaggtacctaaactgaacacccccaaggttgcttctcattgtcacatctatgctcccagtcatttttaacatgtcttaaggtccttcccgggtgtaagctacgaagaaatggttggaggctcaaatttaagtgagggccctatcgaagcaatcggattctcgtttcgtatgtgtcaattgttcaacagtcttcgcatttactcttatggctgccgatgtcctcgcaaggtttcatacaacatacctgttctatttcgggtggtggaatcttccgttctaccttgtgggccatcgtcatctgttccatctcggcgcatagatccaacagatgcaatcatggcattgcgaatgtattgcacggctccaatgcctaattccgctccacgatccccatagacgtcctacgaatcgtcaaaggtcttatcatctactagacttgatggtagctggagcccggaagacttcgggccaaagtacgtagggtgagagtccctctcgcttaggagcgagctcggcgcactcaatccaaatgaatctgatctttctgccaacgaggtcaaaggatcgattctttcatttcttgtggttctcggggtgtcttaggggctcttagggctgagaggtggaggacactggttggtagtgactgcgaactatagctagtggtctagtaactactaataactactaatcgaattaggtagacagcagcaaatattgcacaggttcattcactactagaaatttgcattactgacagacatatccttttatcatgtacaggatatgctaagtgatatgctaagtgttgaaaggactgtggagttggcgtaacataaccctcaccatatccatcgtgtttctcgtgtccatagaacgctgcaaaaacaagcaaattgcaagaatcataagaattcgtcaacggaaccgaaaagcaaaaagcgaaagcgaaagcgaaagcgaaatcgaaatcgaaatcgaataaacatggtctcgtaagtcatgaaaagcgcgaaaatcagatggctcgcacgtaaaacaatctagtaagatatctgcggtgcctcatgaacgcggtaaggatttccatcacggtaaagaggggtatggtcgttccgggaatcggccgtcgaaggggcatattcgatctcatcaggccagcgatgatggcgagagggtgggccctggctgtgagcgcggcgacgctcccgcttaatcgcacgttcggcgcattcctcctggaaatgggtgttttctttgcgcttttccatgagttccttccattcaccataggcacccttgatacccagtgcagcgagaccaatactcagggcgtccttggcgttagcggtcatgcggcgtttgcgggcctcctcgggcgtgatctctccctcctgtaactgcttcagtcgctccttccttttctcaatgctagtgtagacactgtgcgcagcgtggatggtggccacactggccaggcctcccgtcaccaacatatcccgcttcagcttcttccgttgcttcttctcatcagaactgtcacctaggtcagaatcactctcggagctggagctattgccgcggtccttagaaccggcaccgcgcgaagcactggtgcgtgcacatgggggtggatttcttccgtccgatgaacggtaccgacctacatctctcgagcctttgccccgtctcgagtccctgttgtaataatcgctttccgcatctgaatccgaataatcgtcgtcccgatgtccccggcgatgacgccgctctcggtcgtcccgatgctcccgacgatgctcccgatgctctttacgatcgtctccgctatcgcggcgacgttcttcttgctctccgccgagtcccagggccgccatgccctgaccgatgtagtccgaaacactcttgctgcgcttgtgggaaccacggtcgtcctcatcactgccacgagaatcactacggccgcgatgccgagaacgtgatttcgagtgtgattttgagtatcgatcatagatttcctttccggcagcagcaagggctccagtggcagcgaggttcttgagaccaccacctgaagagtgatcccgaccacgagatcgtgagcgcgaccgtgaaccgccaccgacaaagtgactggcagccagacctgcaagcgtggactcgagaacatgacgtgttccatgcttgctggggtctctgtcgacaaggccgtcggttccagcagcagccacagcggcagtgaggacgcgctttcctttcgcaccggcccattcgccaggctctttgcgttgtttgaaagcctcaactgcaccagctgtcaaagcggcgcgagcagcctgagcgatgcgctgcgtgcttttatcgcgtttgctgctgccgccacgatggcgactgcgtgaatctgacggtgaccttgagtacgatcgatggtgatggcgggactgggaacggctgcgaccacggtcgccgcggctggaagaagcagcggcacccccgaggcctatggcacccagggcttgatcgctgaacgacttgcgacgtctgttgcggggtggagagcgacttggcgaagaagaatcagaatcatatctggagcgacgggagcctgagatatattagaattgatctcaacgaaatctgctctatattactcacgttcatcctcgtagtgtcttgggcgacgaggaccagagcttcggtagggagcatcgtaagcgccgactgaggaggcacggcgcacattttcgtagacaggtcgtctcgaccgccgagagtcataagaccgctcgtaggtatagtccgagcctggcggatagtcgcgctgtatctcctcgaccgagtcgttgctggcacgaggcacatatgagtctcgctcgtgtcttctataatggccgcgaggttcatcatatggatcggcgtaactggtggggcgtgcgtagcggtcgcgataacggtcctcgtagtacgccatggttgaggcgaaagtgaggacacaaattgaaagataaagtcgatatttgtgaactactaccgtccacggggaaaataggtgggatggaaaaagaagttcgtgaggggagatgtatagcggggctggggtggcgtgacgatgtgggttcagatgggcgagcgaagtatcgtatctggggctaagagacttggcagtggctgagagagatagccctggagtattctagaggtgatacttggatgaaaagtacaaagttcaagggacaattctttttaaaacggtatatatagcaaaatcaggattgcgccaatgacgtacaaaggaacagcgaagcattcttcaaagcggatataacgccatccaatatcgaatgagcatctggactggcgttgtgtatcagagatcagataggactccgacgtcatcctgcgtcccaggacggtctagccctatataatatacacaaaggcagacaattggataatgcttaactgcttaatctactttcaaagagatgtacacccttggaagtatacagtacatctgagatgcaatatcaaatatcggagattaagatttatggaacgtaaacaatggttccacgggtcgccttcgggggtcccagccgcttacgatctggccaacacgacgccctggatctcgttgggtgcagaactggttgcacaacatttctcatgggaatccctgaagggaagctggacagtatttggctctctaacacatcgccgcccacaatttcaaccatcacacataacacgagaatcagcacatggtacatgagggatataaaacagggaaataataacacatagtaacacgtatgatagacctagacgtcacaatgatatgaaacgcgcagtcatgcagaatcgctgaatatgaaatacaaaaacacaaaagcacatccgagagcccaaaattgaccaaaagaaaagactaaatagacatgatcgaatcacaccgcacagcagtggccaggcacaaaagacccaacagaaggagaaagtcgtatactaaacagcaaatagaatggacggtcggcgaaaaccgacctgctttcttagggcgcctggggaccaggcactgggacagaccctgggaccggccgtgcacctgcctcgataggttgactgacattgcgctggtgcgagacggaggcgtataccgcgtcaggacgagccatcgcccaccgagcatcaggctccgactcggaaatagagcgcatctcgtccgagtgcgagcgatgggtccggatgtgctgtttcatgttgtctttcctcgtaaaggctttgttgcagatcggacagtgcacgctcttttcgccggtgtgctttttgccgtggcgcgcagcatggcccgaagtcgtaaatgtggaagagcacccatggctcgcggcataggggcacgggtacttgttctttcgccccgtgccgcgcgtcgctccggtctgagaagccgtttcggatgtggttgaacgagtctcgggtgatgttcggggagctgctggcccgcgagctgggaatcggtatggttcccgtcgcggatcctgccgggcatacgggtggtaagatgatggttgactggtgagatagtcgtaagctgagccatcggacgacccgggcgaagcgggctgggcgacgtccgtcaccgcgtctgaatgatgcctgctccctcgtggtgatgttgctggagattgggatgaagctgcagggcgggtatactgtgggtcgctgataggagagggtggtcgctctgaatgtggatattgtgatgatgatatgtgagtccgactaagtcggggcgcggaacggaccgcaaaagatgggttatcatcattattcagaatggacacaatactcgtcctacaagtggacatctcctcaatgccaatgccccgatatgcggtcaccgaggctgggaaattatactagagacaaaatgaagttagtttagactgttggcaaccggctcagccgggctctgggaactcgcaagaactcgagagatcgccggtctgagacaaggggagaaagggaagagggtgtagaagaagagaaagaatatctctctcatttcttgcccccccggaggacccgacaaacgcaccagcggctctcgaaatatgtttgtcctctgtgtcgtgtaacacgtcgacaacattagaccttaaatgggcactcgcctgcagacctgaacggaggcttgagcttgtgccgggctccgtgtcttttggaggcacgggtgacgagaaagtatctcaaaggttgttgaatgccggagatatgacgacttggcagcgatagtgcaaggtgaaatgcgatagacgtctttccctcgctgtagaacttgttcaaaggctctggtcctcttttttcgccttttcttcctaggatttcctttttttcctttctaatttctgcaattgtatgtggggaacacaatcctcaacggcagttgcaaaccggcctggggatgttgcagaaaagtcgaagttcaacgccggttgtctaacccaagtcacagttcttccagatgttaggccgtctgggaataagtagaaacgaaatgcgctctgcgcgtgcccgtgatagaggtagtggaaatgagtagtcggatacgagataagaggggattgaaatgatgagaagtcgaaacgagataagagttcaaataggaatatagatcgagtagagagaggaaaaaagtgaagagcagccaaccatggccatcggtaactaattatactaaaaaatgagcgaaagaagccaagctccagggtctgtcgaggctccccagagaggatacacttacggagcacgctatttagttcggtggagcccttcaaaaagaaaaaagaattaatagcgataatataaaatgctaaaaacaaatatctacaatacaacaacaatacagaccaagacccctaatccacacccttgtacccgttttcttctccgtttcttccggcccgcccgctaactactccagtgaggtctgtgacatttttccatttttatctgattcttggacttgcgttgctttttttcccttacgtctaaatataatactgtatgtgcagttgggagtgttaactccgactggcttatcatgcggactagggcttcggctgggccaagcgaaaacagggagagatccaccatatcggcagaaccgcgggcaatcatgagaccattggaccctgagcaggttaatgactatctttgcggatttatggatttagttttattcttggcttgagggagataaatcagaaacggacaagcttttagccctgtctatacgtattcgtcctccgcgctatagctcttagactacatttctctctggggaaaggctcagaacatacgtaagtgatgatgttagtaccttggcctgtttgggaactcacctccggcttgggattccatagcgggtattaggttcaattcgggaaatcctgcgttgattggtggctttaggttcttacttttcccaaaattatatctttgttttattccgttttccttcttttgctattactgcagggcgatctcgccttacggtaaaagtaaaaaaaaaagtaaaaaagataaggcataaaaggtctagccctgagatctccaacgcttccaaggttcaggtttcaacgctttgataatccattaatcataacgtggctcccttgcttgtcggactttcgctttcttgaaagagtactttgcaccgagatttcttctttttccccgagataacccctcgtaaaaagttacgtggacgatggaggtatacacgaggattgcctccacatgagtaaagataccctagtgaactattcaaccgaacctagatcttctgtcacgtctgctttgaacattccaaatgatttacatgggagcccagggggtgaaagggactggcccgtgcaactattcgtattcgtgttcatccgccccgctccgagaatccattcgcggggactctctccagggctgactttccctctacgttgtagcacacgtactccgtaagtcggtatataatgaaacagactgctttcagaggttaaaggggagtgacatgtttagcagagatagagcgacagatctgatattgtaatgacattatcaaccgtgtaccgagaatactctatgtcatatcaattccatttccattcatttccctcgtttctcccgcaaatacctcgtggcaacgccgatcaagccaagcttcaatcttccgatctactggaactagcgtcagaattatgttgtccaaaattcgtggctggaggacgcggaccgttttggggctttctcagccgagaggtgatttgcctatactcgatctcggacggggccatacgtatgcagcctacgtatatccacggtagacgtatatccggtagttcgggatgtctagtgcagcaaatgcgcttccgtgcttgtttcgactaaggatttagtgttcggatttagtgttcgagacacttctcactcgccgagcttacgccacaggcttgattcgtcagggcccttgtactcgtcttgtttcgaggtgcctggaaagaccctgttttttattttcccttgtttgactaggatgcagggcctcgtggcccgcttactacgatgagactagtctggcgtggaccagtagcatagcgggtgctatcatcaccgttcccgcttagcggcatgggataccctaattgtgctaactacaaccgccactttttttggcccacgcggcctttttatatgcttacgtgtttcaacccttaacccttgagctagttagttagggcgtacggagtacggtgtgcgaagtatagaggcgcagaaaatttcacttgaaccccgacaccggagattttatatccgaatgtccgaccaaaaagaatttgatctccactcggtttccaccatctttcccatcttcgaatcagaagggcattttcagctgccgcccgtccaatttgctgcctgatgtccagattacagtcggtaagcatgtgtaagcatatgtaagccaggtaatgttcacaagtcaccggcatttatgcttaactccatagagacgatccggcagatgccttcccggccatctcccagcgtggagcctttcgcttccacactcgtgttcggatgctttcgcgctattgatcttgtggtctatttcgaggatctggagccacttctgggtaattatggacctgtgctgagtcatttatctaggattctagttcctgggcatgctcaacatatgaacaggttcctggacccctgcttacaaagcggaggaaaatcgcccgggctatcatccgtatgtgactgtgggtatggacttgccatacataactcagggctaactacggagttccattctccaaaatggatcaaccggtcccttgcaatggtctgagcgcccacgtatgataaccccaggtatcgcagtttaggctactgtcaaacctgggaaatccattgaatattcactttgcctcggggagctctgttcttgcccgtcccagtaaggagacacacattctaattcctaacatatgttttgtcgtattccgagacatttgataattacatctcaagtcaaccaaactgtatatcgaacgactcatcagatctcgcgtagtatccgtcatctctcaacaattccctcctattccccagttatctaagtttatgtgcccaccttgaattcgcgcacccaattgtatttagtggattgttgtaattgacattcgtactagtaaacaggaaaacacaataactagcccaccttctcaaaataaacatgctatcaatatccggccacgcggaataggcataatcataacctccattatcatgcgccaccttgccaataaataagggttcggccggatctggtcattggaggtggagccgaggacgtataaaaatggatgacgagagcgtacaacgtactctaatctaagtgcacgcggtgatatgtggctgagagaggcgcagttcatacctgacgcgaacacctgggtaatccacgacaacgactttagtacagcgatgcagagagatccggtcttgataagattgatttaccttgattttttgcttgttttccgtcccttattggctgccaagcagccattgagccttagcgtctctacgtatggtgtactatgaatgaagctgcgtcagcagaaacgtcattttggtgggctatctatgctccatactggtgtcgcgcgcatcaagggaaattacttcgaacagaggttagcccctgcatatttgggtggggagatatggcggctacctagagatggtggtgggagtctcggggagttttcggggattcgccgagcggagagggacgaatacggaatgggggtcgtattgcgtggaagaggggttatattgttggttatcttaattatagatgttcgtggaattcctaacaccgttctttctatgatgttagacgttggttctacacctaatattatgattgctggactattgactgtcagtgtgccggtatcgatacaaccacgggtctcttgcgaacaccccttaaactgaaacgtagatgagacagctaggcttggaaagctaataaggtgagacatctggttacaagctaacggcttcggtgcagtctaaggaataccatgccccgcgagattgactcttgtttcatcattcccacttcccctctgatcttgatgtggttaaccagcagaatacaatcgagttgagttcttcaaacgcaggtaataggtatagccctcaaataatttggacacacattaagtaatagaaccatgctgacattcatttatcaatctcagactgaacagacaagtttctacgtccagtccctcctctccaaatcatgcagtaccttgatcgtaactcttcataaccacctacctatgttctggacgctataccatgcaatcagccaaagctaatcgtctagcctgcctttccctctatttctcctcttcgtcctttatcccatacccgagaaggaagcaagtccacccttctctccaaggccgagacccgcacgcatgtcatccgacctcgaaatgaaagcgaagccgttcggtgcgacacacgggcaccagcacccgggtcctgcgtgtgacgagtggccacgcaacgtacagcaaacacaatgcggggtttgtcaagagacaggactttgtgtgatgtgacatatcctgaggctcgagggccaaaaagggtcatgcgaaggtccggcagaatggaatcgcgcatctagactactggatggctttcttctggtggaaggggaacaggaaggcttgcatcgctctcggagtagcaatcggcatcgcgggagagacagattccgctagacctgcgaatgccgacggcgaccaattcttctatgccagagctcgaggcgtttggaactctgtcttgcttggcttggattcctcgcggaccagtcttttgctcgcggaccagtcttttgcgtcgcgttgtcaagtgctgcgtggcatgatacaatgaagaagataggaaatgcgatgcaaggcaatgaattcaaagtcaggacaagtacggagtgcaaaaagggaaaggtaacccttgactttggcgttattagcaccacactctaagcaaccgagttatagaacccggttgttccttccaaggttggcaactatttggctttatcaggaaagtacaaggttagggctgaactttacaaaaaaggaaagcgcgtttcacatcgtttctctacctatacctacacatggataacagggaccaggggttgctcgattaacgaggcaccttgggctgtttccatcttctgtcctccataccaattacaattcctcatctgtcataccttcactatcatgaaactcgtcaaaccacccgattggttctagttctatcacatatataacatatgcatggtcctgaagagataaccccatagcattatctccactatacgaagctacagccattatattttccaagatccaaaagttgactgaaccctagtggtgtaattatgacaccactcgctagggtccaattgaggctctgttcaagtttcatgcctttacccacaccatctgacacagcttccaataagtgattgaccgccgataaacagtacatgaataatatatttagaatatggtcgacaacatgcctggccgatctgagattcgatttaccgattcgatttccagcgctgttcatgcaatagcaaactaaaaacggactcagaccagtggagtcaatttcagggaagctttcggccggctatccagagttggaaaattcgccgatgaaggatgggggcggaaatgttttcccttgctcctcagcctatgagtcgagttcttggtttcttcattcaccatcgacactgtccgagaatcattgaaattcagccgcaatcagatttccttgttctactctcggcatccaaacacctggaagtctctgatcaacaaaatgaatcgcatcgctttcagaacccatgttgtgggtagcgattgcggagataatgcggagcactaggggctccattcgagggtgggtttgcaagtcttagggtcgaggctatttgtagcgaatcgggctctcaaccagaccgcatcgggtcatcctcacagggcatacaaattccacggacctagacagcttaaaagcgctaggattcatcgtctcattggcctatgcagcgacgcgcttgttaatcttacttttgtggaagacctggtccaacagtcttcaaacgagacattaagaacggggctgcttactatcctcgttccgaactctcccgccgtttcactgtgattcgctccgtctaggctgtgcaggggactgtatcggcccatatataggcgctgtatagtaagtacaatatatagtgcggttaacaggcgcatcgcaacaatctcttgaatagcctcatgtcagagtctagaatcgtctaaaaataaccaagtaccctgataaacaagatctcagtacgcttctcgcttaaaatgcaattaagcccccaaataagcaaaagcgcagaccgacatgccaagcagctaaccagtttacgatagggctaggaagaacagtacactgcccaagtggacccctctatttcagccccatgaccccttttccctatttttatctgtaggatgttcttgctttaagacggttgtcgttcttttttgttttccgtgtctgtacggagtgcaagttccacgatggcttcgtcgtgggagtcgcaacactcgctgctatccgaagattcgatcgacgctcgaccccagcgttcttggaatccactcaacaaccgccgcactgactcggagtatcgctaccatccgccctcagaaaccacatggtctgaagaagtcctgcacgagattgggctaggcatctcgtccgccgacgccattccaatagaacttccgggagacaatcgccattcaaccgatagcgctgcgactacaactccatatacctacaagatcccgcaattttcccagactccgactccgcagactccacatgcccactcccacgtgcggtgccctaatcgaggaacggtcctccaaaaacggctctcctgggtcccattgacagtcttggttctcgctgtctatgccaccgtcttttcaggtatctttctcggcattgcgctgcgtaagccccgatggcgcaatgtgtccggcgatggaccagtggctccatctacagcaaccttgttgagctcggcttttgcaaagacgatcgaattgtcttatgttacgatttgcgtcgctttcctaggccaggtgcttagtcggagggctttgatgagggattctcgaggaatcagtatctcggatatgaatatgagggcctggattatgcaacccggatctatgattgtgcattgggaggcgctgcgatattcggcgctcactttccttggggcgattgcactggtttcgacgttcgtggcgatgctatataccaccgcggcgcaagctttgggtaaattattcctcttccacaacttatgtcaaagactaatcaacgacagttgctccaaagctcactcttggtcctatcgagccaaggttactcgagggcaaggtaacctccagcttcgcgaacccaaaatacatcgcatcggactgcgcgacacccgtgaccaacgaaatggacccggagtatcgcaacacaacctgcattcagattgaacatgtcggccacgcatatcacaactaccagcaatggataacccaatggagcgaggtagtaagcagccacaatgatacctcaaaccaactgcgaaagcgcccacagccgacaggctcactatgggacaacaccacaataacaggcagctggattgatatccaagatatgtccgctctgtccaagaaacacggccgaatggtcaacaacataacaatggcaatgccgcatggcggcatccccgccgcagcaatgaactccaaaaacaaactcaaacaacccacagacacctccggtgaaggcaaatacaacatcgaagcctccgtcccctcgccagccattaatgtcctctgcacaggaatgacgaaagacgagctcaaacccctagtctactccacctggcccggcggtcacaaattcaacatgacgacgtggagtacctcacccccagacgacatccctcgagccccatcctggctgaaccgcacagtcgtcgactcgctcttccaattcggcccgaaatacggccaagtcccacccgtcttcggcaaatacccactcccatacaacacgatcctcaacacaacaggaccctggcccgcaaacgccatctacctcctcggcgcgacgccgccatccaacgacagccacatgcccgagtacgtgatgtgctctatgcgcgggaagcaaaccggcgtgtgctcgaccaagtactccgccgacacaagcggcgccttcctcggcacaaactgcgagagcgcctccaacgacctccaatacgaccgccgccaagacgtgttctacgagggcgagtggaacccagactggaagaacatcgcagcggagtgggcgagcgcgctcagtctgaattcgggtatttcagacggcgcggccagcaacgccagactgctgatgcagatgatgccacaatataacaagaaagaagggactttcgcgctggacccgactctgccgtctatcggcgaggggctggcggtcatggccgggagcacgcttattctcagctcgcagaacgcgccgttcgtgccgttttggaattacagcattgagaataataatgtgcttcccgagcctgtttaccaggtctttaatgcttccatccaggcgtttgggtatgcttccggtcccacggagaagtggcaggggattttctacgtgattcttgtgtttgcgttcctgaccagcgccatctgtcttgggtttatgattttcgaggcgcgcgggcggcaggtgactgatttcacggagccgcagaatctgttcgcgcttgcggtgaatagtccgcagacgacgcagttgaagggtgcttgtgggtgtgggccttatggggaccagttgaaggagaggtggtttattgggatggaggaggatgatgagcattattatattcgaagtaaggcggaggagaagattccgttcgtgcataagtcgatggactcgacgcatttggagccgatggagattgatgatgggggtgggaggatgctcagccctatggtcaatgagtttaggaaggtctcgaagcgccattcgtttttggcgaggctctattgaagagattcctagtacatctccatttggcggttggatgcttatgatccatcactgatttacgataatggttgaatgtaaggagtaatgcatatgacgacagggcatttcaatagcatggctggagcatgcgcttgatttcaataagtgattaacactaagatcgagatatgtacaaaataacatgaacacaacacccatacaagaactagaccggcacagtaccggcatagccctcgaagtcaaaaaaaaaaaaaccggttcaacaggtgtggcacaacgctcgggaatcgctcatacacacaaacaaaaaacgaggaagatgctggatacagataaaaatgcagcatgtcaaatgcaaggacaaaaaacaatgggctttttcaagacaccagtagccacgtagacgccatgaaaggaatgaatgagggagataaagagattcgccaaatgacctagcgaggtgaggtattttctgaggaaagagagtgagagtatgggagagttgggctccaaatagactctgagtcggaataggcgaccgtgtattcaacgatcagccttgagattgagccagctcatatctgaattggtattgttcttcggcccttccatcggaagttcatcgatatcgtgtggtatgatgacgctggatcgtcgtgcattggactgccttgccttttccgcgacgctggcattcgatgattcccagggcaaatcttgcgtgctcgattggtagaagctggtagtgtagttgctgcttgtgggacgtccaagccagctgttctggcccgcaccttgccactttggatcatcgcggtcgtcgtggtcgtcgtccgaggtgacactgattgaatctgcgctggagatgcgtgccgattggctctcgggaatcaccaggcttcgactgcccgtctcagatgggccattttccgtggtcggactgccgctgaaaacctggccgaggggcttgggctcgtcgaggaagccaaaattcaatggtgtcaacgtggtcatcggccaggcgcttccgcggtaatcggacttggtgtatccggagctgatagtcgagcggttggattggtagttggtggcaccgccgtcctcgaaatacttcccccacccttcatcagtcaatcggtcagcggcttggtttccacgcccggtgtcatcgccgacgttgccgtcgtcggtgtatatggttggtgggcccatagcaccgctggagggaattgtagagagtggactgctggtcttgggctgaggagacaatccatagcccgtattcgtcggtggcttgagggatttctctccgtagttgccggacatgatagccaatgagtcgaccgaagcagcggctagtgggacaggagatcttgccatggggtaagcgccttcggtcaggggttctatgccttgatcctggaagcttaggcgatctttattatcgccaccaccaccgcggccgcgaccgggttgggcaagctgcttgtctttcttgcgtcgcagtatgaaaagaatcataagcagtatcaaaccaaatcctaggatactcccaagagttgcgccaagaatcaccttgtcatgttcagtcagggtgccacttacagccgcagctgatgttgatgaggcgggcgtagttgaggtcgcggttgctgtggatgacgaagttgatatcgaagtagacgtggtggatggtttgaggacatcttgatctcctgttccataaaacagctcggtagagttgacccatgcgttcgaagtctggttgaagattgccaatgattcattacttttgccgctggcgagaacgacaaggccattactaccctgggcgagcgtataatcagaccaggatactgtcggggcgaatgtgctgttataaggatcggtgagacccctcttttccgatgatccgatgactgtaaccgggttctgcgcctttcccttcgagctgagaaggtagctagtggcactatttggggaagcaaccatcttgaactcctcgaggaccttggtcccggagtcggaagcgagcgcgcatagcgatgaggatgcgattggattggggagagtcgtattggagatggcccagccttgcttatctgcagcctcgtagatgaagatactaggattggtggcagagcctccaaccaaggctacctctgaagaactccaaggcaaaatgatgggctcatataatgccggcgtgccttggtcgaccgtggaactcacctcaaaggtagacgagtttgttgaaatgaggtatgtcgactgagaaacctgggtgctaccgtctgtgtttcctgcgtaaaccagtatttgcgaggtcgaggatatgtatccaacgccatgtccaatccgatctttcatctccgttgatggtaatgtctcccactttcctgtactgaacaagaagcgttggaggccgctactgccggaggagccggtcccgccgaccaggtaaaatgctttcttgtcttcgtcattttcgatgttgtcaattccaccctggacgcaggcagggccagtaaccatatgctccggtgacgggagctttttccatcccttattcttttcgaggggtatttttgcaaagccagtcggcgaatagacgtagaaagtattgttgtggatagtggagcaatcgccctggatcttgattaggggttcgggtccagtcatgctgaatggtccaaatttgattgttcaaagtcgcaacagattctggaccagtaatgaaggtaggtggccagccagaaaaggacttgaactatccaaattagagaagtaaaaggtgactaccagagcactatctcatctcgaccgccgaggcaagtgagtgaacaaaggcaacagaccacactcgatttgagctagttgacgcgacaacaggcaacgtgaacacaggtttctcggctgttttccgcgcggttaactgcgctttcaagttctccggatgaacctcaggtggatcgcgtatcggatgacgcggcgactcgggatggcacaatcagggtagtggttcaggttgtcaacaatgagaatcacaacaccaacgcgtcggtcaaagagaacatcgagtaatcacaaaagtatgtggggctgggcgatctagtcgaaaggtagaaaacgaaggaagggccaacaaaacccgattaagcgaatgaggggtggttggcaaaaaagaacgaatgctagaatatcaaggtgcgcagcacgagggtaaactcagagaaggggaggtaaaaggagaggcagaacagagacagaaaccacacgatctaagtgaaacagggaggagggcccctcaaccccctaacggaggaggttagcagacgggttagggggggttagcgaacaacgccatcccttaaggggaataatatcgtcattttcaattcgtcaggtaactttcccgttaatttggtttttttcactttaattgggtctgatactcattcttattactttattcgctctgattggttcgtttcgccctcattgctcctcttctatattgatcaggggggttcccgacaaagtgggacacctctcgttgtacctggacccccgttttacagcttggctttgacttcctagatttccaattcttctagggcgaatctcgggatatacaacagcaagggagactgcggatgtaacacatagcaatattctgcacataataacagaatcgaaataaaataaatcagttaaaacaaaacaaaacaaaataaaaataaacaaccgctcttctgaaccttggtattccctcaagagaccgtggttcctgtccgttggatccatggaaatttcaaaactgtggcgccttggcgtcccacctccaaggttcttcctctataattccactttcctatacaatgctgtacaaagtataggacactctaagcctcaatatcaaatgttgcctcaaggtatccattccacatctgactcagggattatcaaaatcagcgatgccctgttttgtaaaccggaagagctctaggatttctaatttcactcacaagtgtacagcatatagaccaattttcaattcatacgattaacgaatattaactcatcctcatgtccctagaatctcggctttctgcaatcattccacgccccttttgtacccaagtccaaagatcaactattacgcacgagcatgtgctaattgtgccgtagaaattcttcctgccaatttcgtaaatgtgatcgacaggctgatcagaaatatggcaccccactatttaaaagagggtgctagttagggtctaggcctaacgttgacatcgatccgagcgagcacttactgttcttggtaggattggaaggtaggtagttgtatgaaagtgacgctgacctatgcagtctcaatggctgtaatcgagactatgaaaattgtatagaaatcagaacaatgtgaacggtaagttcatcaactgaaagcgagaaggatgtgtggcgcgtcactgctctcgttgttgatagctcatcagggtcgaacattagttagtaccttgatggtagttgtatgtctaactgactcaagttactatccccgaaagaagttgttcgagtcgccttcgttctatggctatgatcctcaatgaacgtagttgtattgttatcaccattattttcaaagactacgagaatatccatatttacttcaggtcttagcgtctgcaatatatattttctgttcgatgtcccgttttgtgcgcaaatcattctatatatagacgtctccgctggagtacaggtagtctggctcaaagatggacacgcataaaagattttccaatgtgcatttaccttgaaaccatcagccacagacaaattaaacacttgatgcgtctgaaagtggcgtttctggcaagagtttaaatgaagtctctacaacatatcacatgttctaatcggggcatgcgattatcgactatagatagccgccaataggcacaacggatcatctaacaataacggatcgctcatgatcgacaagttagctgtcgatctctcctacgaaggatcaatatgcccatcgtggtcgatgtttcgagtgtcattactcatttaataggacttcgttaacattgagctatatatatatccgatgtcactacttgagatgtcgatcgagcgaccctttacctatgtacatggtagtaaaaatcaaattatctgaaacaaaaaacagactatgttctatataggaatggattgttcaagaacgtgctatatatgttgtaggatagagtgaaaggaaggatttcgggagtgagggataagatatggagcatgcatggggctgtggagctgtggagctgatatgcatgtactccggatgtttcgggaaaatgtctcagttctccgtgttttgatgatacagattaggcattaatgtggatagaactacggagtatccaagagctgtatgtacacatctactcttatctcatgatctgctttgtgagctgttctagtatcaatggcggatgacttcctgtttagattctgaaaagccttccgatctctaattcagccgacgcaggtaccattacagagatgtaccacaaagccagccccgccctctggaggatttgatatggccagcatgcacgacatccataccgcatacttgtctaaatgtaggggacagctaatttggaccctacatatcgattcgtgccgcttagccggcgaaaccgattcgatcgaatgagacagtgtggttcggtttcattgtcacacgcagatatcgaaaatggtattctggtctgtattatagcacatgaagtccgtcctcggagtgggcttggatggatattttcatgatataaagatccaaggtgtcaaagcaggggcaaatatgggaatcaattgattttgtaaaatgaaagctaccacgcgcttcaagactggttctgctgcttccattggtgtgccttttggagcagacgagaaagattggccgcagattgatcgtctgcagggaagacatggtctgtgtactcctcgtactggtcgtccgccaacttgcggcgcttcttgacaagtcggggcatctgtttatcgatcttttcaatatcctcgcgcgatccaaccgcatgctcgaattcttgccagttgttgagaatatccacacgctgtacacatgttagaataagccgaacaccgtgtaaattatgggaatagcaacttacagaatccgtgagacccttttctttgagcaccttgtgtgcccgagcaaagactgcacgcgcgcgggcctttgcgtcttcggtaatacctccctcctcttcttcgtcctcttcctcgcccggcacagaggcttcgaagcggctgtagttgacccataccttgacgtgatcggttttctgaaggagacgttcgtacaattgtcgaactcggtcatactcgccttcttcatcttcaaagtcaatgtatgccttccacacaagctcgggcatgtcaagggtcggttgctcgatgccaagctcgaaaatggcccttgtccgttccgcgtcgtccagatcatgctccagcttcgcgaaatgcatccacgactggctgttggaggggtcccattcaatttgcttctggaacaaagtgcggcaccgcgcgaactcgaacaaccggcgttcgatgctgatatagccacggaaaattttgtctttcggacacattccaatagcttgacccaatgtcttccgtgctgcttgtagttgcatctggcgaacttcaaactgtgccttcaagagccagactttgccgaatgtgaacttcttgtgcgggattatcctcagacattcctgatagatttgtccagcgcgttccatgtccttcgcttccatttcttcccacacggcgtagaagatccatagatagatgtaccggcgccaatgtcttttctcttgtgatgggggaatctgtgcaatggcccgttcgtagatgtcccgcacccgctctgggtcacccgcagtttcctccaatcgggcaaagtcaaaccaaatgtcatagttgcgagggttctccttgagctgctcttcatactgcactctgcgtttggacaaaaccacatcctctacaccttcacgatcaccgtattgcttttcgaaggtcgtgtaggccttgtgaagaagcatagccttggatcgcggaagccggtctagggcatacttgtaaatcgctcgtgctcgctcatactccttcaacttagcctcgaatttggcatatgcgacaaagagcttctcgtccatgaagtcctcccctaacgtttcgatagccacaccgtagacctcgcgaactaagtcacttgtgccgtactcttcctcgaagcgggcccatttgatccagtttcgaggctcggggtggacgacggtaaatcgctggaaaatggcacgtgctcgttcgaactcgctatatctcttctccattttgatgtatgcgccccacgcaccctcttccggctcccatgaaatccatcgctcgaacacttgacgggtaccagggatgttgcctagtgtctcctccatgtagacatacttataccagagcttgtcgatgcgggggaggatagtcacggcgcggtcgaggaggttgcgggcatgattaatattccgggtcttcatctcagcttcgatgtagcgaatccaaagcaccaccgaggtcggatcgacgtcaagcgcacgctcgaagatggatcgcgcgcgacggaattccttttgttcgagctcccaggcggcatagcgcatccagttgttcatattaatgcggttgcgttgtacatagtcttcaaagtcctttcttttccgaccctggtactcgtgtagttcttcaaggtcggcaaagcgctgtgtcggcgcctcaaggccaggctcttgccggtcaacggcctcgcggagaagttgctccgcagagatctgaactggcgcggcggccttgttcttgacccggggagggccacgggaggcctccattttgatggtgctgtattgactgatctcgctagagaggtggtttgtgacttaaaagattgtaaggtgaggttcggttcggggatgtcgaaattgtcgggcaagtaatgatggttggacaaaaggaggggtttgaaagatgaagttggcttcaccaaatcgcagcgaccgcttaactcagaaattgacacgaaggtttctcacgcctaatccagtgacgccgagggtagcttcgacccgcagctcagagaatccgcgatgaaatcgccgaactgcgtgactggtctttatcgccacccgcgcacgtagcttccctatgactaatcacaacttttcttccaccttagaactctaggaatatcgttgctctcattctagtttccctagtggcgttctgggaccacgatcacaagcacctcatacacggcattggacccgtcggacaaattccgagtcaagatgtcaaccgctgaagagcttttacgcgactttgaggatgacgaggaggacttcgatgtgggcgaaggcgaggaagtcgacgaagagcccgagcaacaggaagactccaaggaaggcgccggggcttctaacgactttgatcgctctatttcaaccgccgatgagctaacacgcctacacaaagtcctgcgcgaccattactccattcgattccccgagctcgaaagactcgtcaccactcctataaaatacgccaagacggttgctgtcattcaaaatggccccttcaacgacatcaaggcgctgtccacatcatcagagaatatggttggcgtcccactcaagtcagtcttggacgggccgtctctgatggcagttgcgatggaagcaactatcactaaaggccgggaaatgaccgagtctgagctcaagctggttctcgatacatgcgataggattttgaagcttgatcatgagcgtgctgctcttaccgcaagcattcagtctcgcatgaaccagatcgcccctaacctggcagctctcatcggggcggaaacggctgcacaattcctcaaccaaacaggtggcttgcttgaactagctaagatcccgtcctgcaatttgggtgcacaaggatcacgcagatcagaaggactgggctttgcgaccaatcacggtgttcgagcccaaggtttcctctacgactcgccacttcttcaagaggttcctctggacctcagaaaacaaggaattcgaattgttgcagccaagatggtactcgctacccgcgcggatgtctccaattacgccaaggacggttctctgggcgaagaactgaagcaacaatgctatacgcgactggagaaactcaccgaatctgcgccaaacgccggtaccaaggctctccctgcgcccgatgataaaccctccagaaagcggggtggttggcgggcacgaaaggccaaggaagctgtggctatgacggaactacggaaggcacaaaaccgtcttgcattcggtaaggaggagtcagaggtgggctacggcacgggctctggaaccgttggcttgggcatgctgggccaacaggacgatggtcgcattcgtgcaactcagatcgaccagcgcacccgtgcccgacttagcaagaacaacaagggctggggcacaaacacccccgctagtggcactgcctcatctttgcgtgggtttggccagggcggtgcaagtggcactgcaagcgttcttcaggcacgaggtattcgtgcatctggcgtcggatcatctctacctggcgccgctggtacctctagtactattgcattcacacccgttcaaggcctggagctcgttgacccgaaggtgcaagcggaattgaagcgcaagcgcgatgctgaggaaaatcggtggtttaagtccgggacttttactcaagctcctcatcagaatcctggcaattcacagagtagtgaaaatggcggcttcaaggtgcctgctatcccactcaagaggaaggctgatacgggtgagggcaagatgggccctccgcctaagcgttaaagacttcatttgttttctaaatttcttgcttgattgctttttatcgcggcattttgacggcgtttcagggggaagatcaggaggcctgagcttcaatatgatttacgtgataccaaacccgattgtatattagatctgaactacagtcctcaaaatgacatctttttaacggcggacctgtgaatctcctttttttttctctaatacgccgacataaaagacctttattgactgtttgttctctttcaccaaaccagattgtgcaattcgagctaggctcttgtaacagaggagagtcgatgtcatactgattctttctgtctttgaaatcatttaaaatcagagtttgtcctttcatattgaaatcctagtgccaagatacgccagttagtctctttgtttgcctggtggtgaaaggattggggacggcaggtttcctctccatttgagaatgtttccagcatcagtccatttgctgtcgccaacttgagaaatcagagaagaaattgccccgaaacactatgccggacgatcgcattgatccacattacacttagcccctggttttgttgactgatttatgtgaatcgagccaagcgaagcttagtgggcttgtcaagtcaacactcgaggacgatctcaagtcccattccgaccagtattacggaacatctgcccaagctgaaattgcaactcattaagtcgaggtcaaggtccatttatggtcaccacctcgtcgccttctagagtctatcgcccaacaaggtccacgtcgtgatagtcaaagcaatctctatgcccttgctatcctagcatatcgatcgggtcgaccaagaatcatcgcagcggatgaagcaaccaaacgtcagctgtcaggtaaatttctcgaagatcgtaatctatattcaagaagagaaggagggcgcatctcggtgattctcttatccacacgcagggatcccgattcgggtgagtgttctgttttcgcaagacgagccgtgtgctccctacagaaatcatgttcaatatcgacggcctagaaaatgagtttggcgattcagatcttcaagcaaagctgttcagatccgttcataaatcatggggacccttgcgggcccatggtcaaagatggaggggaacgatgttatatgacccttataaagaactattcaagcctgggacggcagatattctaggaagagagcactatgccaacgctgtgatcactgccctcagtcgctatctacccatcgagctggccatctaattcaaacagctccccgatcaagatgccggtatggaatcgtcgtccaagtaacacacatagagtcatcttcctcctgtattctcaacacccgaggacgttgagaatacgtatcaaagactaaaggaggctggtccaacaaagtatcgctcgaggttcgcaccagtggcaaataggaaattcatttgggagatcgagaggtacaccaagcctcccatgacactagaacttgtttcgtggggtataccgcatgaagacccgtcgagacctcgtcaacttctagaatgaatatcgtgtataggatgctcgattggggagaatcgaaaatgaagtcctgccaaatgaagtcctgcctttgctctatctccccagaccgctatctgccctggacgaggcgtttagcgttcttacaagcaagctccttcgaccaaatttattcttcatgagaatgaaaatctccgatatttgcactgacagggagaggtgaggttctcacgttggccctcgcaaacacggtatcaaagagataggcatctggacgaactatttttatcgatctacctctttggctacctatcatcgcgacaaattgggtttgagctgcggtcttcctcacaaacaagctaagcaacgccgcaaaacaaacattgaagcagatcctcgtcccatccgttgaagtggattcggacgggtccagtgatgatcctcaagatgatccattaggccccgagtatttaatcataccttggcacaagaacgctatggtcgatggaaaggtggaagatatataggagcttattcaggagctttatgtgcatcctcatctgcgcggaaaacgcacagtatcattcgtttgtgtcgatcggcagtttgaacttgatcgatcgttcattctgctccaagcagatgagttcaattctgacccggggcatgatttactccaacccttgcccttcccgagcctgagagggttcaaatatacgcgtgcctctactgggttggcatttcttgaggccccaaggcaaaacatgatcgattttgatgcagtggaccatgattggtcaaaatatcgaagaccgggatggccggcacctggggcattgcctgatgactctgtagaggatatagagtagttgacgggagcgcttacccttgaatttaccagtggaatgaatctatggatgacttaagctgagttgtttcgttccaaggttcagttaactactagttacatggttggctacatctgtagttagttgtatgggactatctgcgttgacatgttggcgggatcacttcacagcgcaagagatggtgaaatgaatacgtgtgtaaagaaataactcgaaggatttgatcctttatgtaagagaatgttcaattggatgtcagaggtaagcccaacagacccaatcgacgacctaagcaaatcccaaatttgccgcccacattgcgtgctcgtccaagcacacaatcgtggaatgtggtacagcatccacggtatatagcggtcaggggagtgtatataaaagcctgtgcctgcaattttcttttcgatattgcgtatataaaattttctataaatttaggttcgcctccacgttccgaacttccgccaaatcctatttcttgcgctacttgggtccccaatttcttatttccctcaaatttggaatctttttaaattagattcacagagatttcgaagcatgacgtttagcatagccaaatcggtcctcatcaacccagtcccagctagcaaaagcctcccagacaagggcgaagggcaagaggttttaagcttaactcgactcctgcatcacagccatgttactacagaattcgaccccttgagatttgaggctgccgcatcattgcaattgaaattgcagctcgaggggcaatacccagatacagaaacagatacgcgactcattgcgtcgccctacaacagcgtcccccatctgctggacattgctgcactggaaagacaagaccgactatttgcattggcattggcatatctcaaacctatccgcgacgactatgccaccgctgactacaccgaatcattcaactggaccgaggtgtatgatttgctgagagtcttctcacaggccgaaaaccacacatggaaatcacagtcatactatgttgttattttccgatcaatattgttgccggatattgactcggaccgtctttatgatctcgatgcgcattcgcaccaggaggccattgctagtggcgggctgttgaagtattggtttggggcgaagaatgacaagcatcgaaatctggccacttgtgagtatttgactattctatgttattctgaccacatgctgatcaattcgaataggcatttggcgcagtcgaaatgacgcgagacttggtggtcttggaccttggcatgctcaggcaagagcggccgctgcagtaatgtatgagcagattcggttcactacgctaaggttggatattgcggatggagtgcagtcctggaagctgagtgattggaaggaagatgtgctgtaaatagcatcgttggcattagcaagattagatttttgcatttgatgtggtctagaacgacatgacattgtgaacctgtacatctcgatgaatggctaacaacaaatattctatatacgataaataagacgaaattaacgatgatagacacaattctccctctgatggcgagaccaatgaaccatcaaagaagaatgttaaaaagaagacaggaaaagaaacgagcgcaggtgagccggtgatgttgttgatcttgtaactgtttctcgcaatccctcgtgtcttctggcccatacaagacagatcatgccctgatcaatgcaatcaatggagcctatgatagatcggagctaaagtcccctcacttttcaatatgggaccatggaaagacaagcaaggtctctacacaatgccgcggcgggtgcaagaggtgattgagagagatggacgggcttcacagtattaaaacaattgaatacagtgattaataataaattactggcaggataatagtggagaactacgtttgtttcttggttgccctgtagaaagaggacaagttgaaacagaggagtatgcaagcatgggacagtatcactccatcattccagtcagtttagattgtaagcccagtgagccctttttcttggcagagttattatgattccacaagggcggacgcacttgattcgcaggagaatttatctctggaatgcgttctgtcgtaactagggatcgacataggcccctagatccacgaaggaactctttgctcaaggaaaagttattttgttataatcaaggcgagctcgtaagacgagcatcttatttagaccatcttagctgaagaaagcaaagtttgaattgatctacaagagaaaaaaaaaaggaagataccctgggagtgtaaacatcggcattcaagtactatataaatcctcattccaaatgacaagagactggcatttcggtaatttcggatcgcgtatccgcgtttcagacgttaaatcttataatagttgtgaacttgagatttatctgtttccaattagtgtcaggaaaatatctcattttcaagcatccactttatcacaacatacgcccaaattcatacaatatgtctcaagttattccaagggcatcatggctctcactcatcgtggtagcactgctggcagtctccactgtcaacgcacatccagtccaccaggcagacgaagagatggaaaaaggacacaccggtaaacttgaatctcgatcaccggttagtccctcagacattgcattctgccattaaaaagcacacttctgacagaagtatagagacttattccagatacccagaagtacgttcatgacatcttgcaagggttgggcctggaagagccaacctcaacctcaaccttaacaccaaccgccacgcccactgccagcgtcaagaccaagcaggactcggagagcatgaatccaacaaaaaccacggagattacctactccagctctaccagttacacacccacttatagcggcaattcggcaagctacactcatactgtgaagaacgtgcacagctacaacaggccagtggagaacgttcagcttgggcatggttggaatggggataagaaagttactgttgatgatctcccagctgcctttgatgctttgtataaggtattggagcatcgattgaaggatgcaattgacagctctgatgagattggattggatgaattcctgtgaggatgtttagtgctacgaaactcgaagcgatggattattgattctggaaaatgtgaacttcaagatatactatgtactactaatgtcgtattaggaggctatagtccatgactgtaataatatcgctactccctacattatcggtgttccctaaactcccttaactccgtgttccgatcccaactccggaaattagcagtacaaatccgcaggtgatgccggtaacccggacgagaagttcgatatccaagttattaacatgatggtttacattgacggagtgatcgcacgaagcttgcggtgaaaacctgtaactacgatcaatcgatccaaccccgacggcggggcatcttgaaccccataaaaggcccatcgcagcccgccaacctcgactttctaccaactatctcttctcaacaatttacgcttatcatttacattcaaccatgccttctatacttggaaaggaagtcggctctattggctatggcacaatgagtgcgatccccctctcaaacacccacaattggcggacacttcgctgattataaaatcagggatgacctggaacacgcagcctccatcagaggaggtgtgcttcgagacactcaacactaccctggaattgggtgccaacttctggaacgccggcgagctgtacggcactgcagattacaactctctgcacctgctcaacaagtacttcaccaagtaccccgagaatgcagacaaggtcgttctcagtgtcaagggtggcttgaagaagggcgagcttgccgcggatggctcggaaaagaatatccgtcgtagcgtggacgagtgtctgcgtctgcttgatggcaagaagaagcttgacattttcgaatgcgcgcgacaagaccccgcgttccccgttgagaataccataaaggttctcgcggagtatgttaaggagggtaagattggaggaattggcctgagcgaggttgatgccgagacgatccgccgagcgtatgtgcctcttgattttatagtcgtcgtcttcctatggacaaactcaactctaactgcttctctagacaaaaggtgcacccgattgctgccgttgaggttgaaatgtcgttgtggtccaccgatatcctccataatgacattgccaaaacctgcgcggagctcgacatccccgttatcgcttactcgccacttggccgaggtgtgctgaccggagctgtgacctcgctggccgatatcccccagggtgattttcggcaccacatgtcccggttccaggaagataacttcaaacataacctgaaactcatcaacgaggtcagtagccttgctactcgcaagggtatcgctcctgctcagattgcactggcatggatccggaccctaagtgagaagcccggcatgcctactattattcccattcctggcggtactacgaaggacaaggtggttcagaatatgggcggtgcacaggtgctgacggattccgatatggctgagatcgatgctgttttggaggaacatacggtttctgggcctcgatactaaggagttcctgcatgagtttttatatttattattagagatagatcagaaatgtgatatgtgcataatgccaatgggtatttgtataggtcagatcaagtgtagaagagtcaacatacaatctcacattaataggtgattgtcaatattgtataattcctcggaattgatcatcatatagtatgtaaggcagttgagaggatccagtgttgcgtagaattcattatatagggtagtgcgcagggcgaaggcgagcttaccattgggtcattgtgatgtactaatagagggggtctgagtattactaaataaatgaatagcatgacagagacgaagattatgatcaacgaatacatataagaccatggaggaagaaagagagggagattagcgttcagttgtgacctcgcagtcgatcacgtgatcccgttcatccacggctgaacacgtgatgtgatacgatggcctccctcgcgcgacatctacagtgcagctaatagacagttcaaatttgtttgctgccacttccattttcctatacgagctatgccatccacaatggcttcacgagactctcccggttcccctctctcctcggtgggatccctcgagacttcagatcatgaatccatgaaacatgaaagccgcgcgcattctccctcgatgtctaacatgccgccatccaagcgtcgtcgcaccggtggcgcatcctgggaccgtcaaactcctctctcctctacccatgacgaaaaccacccacctccctccccgactgcctcgatctcctccgatagctccggcgatattcccaactcccctagcatccttaccctccttggtaccaatcaagaagatgactacagcggccaaagcaccgaccaggttactatttgccgatgggatggatgcaatgctggcgaccttggcaacatggatgggttggtgcagcatctccacaacgagcacatcgggagccgacagaaacggtactcgtgcgagtggacggattgcacccgcaaaggtcaaacgcatgctagtgcttatgccctccgcgcacatatgcgaagtcacacccgcgagaagccattctactgcactctgccgggtaggttgtctcagacccagactcgagcaaacagatctcgagtattaacaatgaaatacagaatgcgaccgcaacttcactcgctctgacgccctgaccaagcacatgcggtctgttcacgagactgacactatgcgcccgatcgactccatctcaaaagtccacggcaccccgggcagcactactggcacccctgcctcgaagttgcaacgcattcgcttgaagctgacccagcccagggagccgggaagtgagtctgagccacacaccgaagcaatcactattgtgccaactcccacccccatcataaccgacgcacacgatcccgacgagacctcgatgccagagtttggcccggagctcgacttcgacgaatcggagctcgccctagctccgcgcgacctctaccgtcttctccgtcgacagatcgcgtgggctggcaaggaggccacacagctgcaagccgagtgggaaataattcgcccgcagcgcgagcaagcatggcgtgagaaggaggctatctttgacgacctcattgacgccgagattggcttgttcagcgcaatggtcggctcagtaccccccgtgcacctaacgaccagcctcgaaaagttgcaacagcagcaacagcagtttcagaatcaacaggagcagctggccaagtcggcagaggtgccgactatcgagggcagcacttagttggcttgtcttccctttcttctctcttttctctcctccccctgctttgctcctcctttctctcaaccttctctcccctgagaccatgctttggtagcttggtctcagaactgtgtcactctgtggtcaccttttcatttgtaaacctctcatatcccggcgtgcatggctttggtgaatgcgttgtgtattttcaacccaagcagaaaagaagtgtcctgcaacggaatgtatgaatagcctcatttctttctttatttctttcggtctggcttgcaggctcagtgacagctcaccactatgggcgatcactacaattatcaataatcaagattttcttctgatctgggaattataatgcaaggctacatagcagacagaggccatgtctagtcgtcaatagagacctaagttttaagacactgaagaggacgtagccctgactccgagtgcctatcgaccctgaagggcaagtttaagaagtcattagaaggaaagacatcaaatggcgtgccatgttgagatgtgttgagacgtgcggtgacgattgcgcaattccatcgagttatacgtgacgtttctttaagtgccagtgtcgtcgggactaactatatagcttatattcctaaacttatttcttttcttcttctctgttcttctgtatagataatctaagagctatgaagaatctaactgctgatgagcggtaccaactggcaggagactactttgctcctaaggggctctatgagtacaccaaaagcctacccttcactggtcgagtaaaaagtaatgttaatacacttgtggccggggaatggacggagatcttgctagactatgaggttggcgcatcgggcctagcagatggcgcttggataaaggccaccttcaaattctactcggtgagtgaagaagcccgatagagcaggctgcagacttgatccaacatgaccgagataggattgggtactgttccagacatcagatcccacaaaagacaactatatcagcgccgagtatatcccaaacagccttttcccagaacagacacccgcgacagttcaatccctggccattcgatttgatcaaaagggacacgagcgacctttccaaaaagctgtgattgtggatattcaagatggctatatgaacccaggcgatcggattctgattcgactaggtgatcgtcgcttcggcggccgaggaacgcgggctcagacattcatcgagaaagacttccgctggaggttttacattgatcctgttgggactaggtgagtagtattatgacagcatcacagcgattgaatctggtgaaagctgactataccgccatagtcgctttgctccgattcagcctgacctctcttggaacatcgtcgctggtcccattcatcacctccaaactgtttctcctcgcgtacttcagccctctgttccattttccattcattctcataccgaggatatctggggaaatgtgactagtgatctcgagaatctttccttccagctgaaggtgctagacgaagaccggaaggccatgatcgtcaaagaaagttctgcatcacagcaaggctggacgaatgctatattctctggtctcagcatcgaagttgacggcgactacaccattgaggttatcgttaaatcgaacgagaaaaccattgtatcccaaaccacccaactcaccatttcatctggtctctcagttcccaaggccctcttcggcgacttgcacgtgcactccgacgacacagtgggaaccgagtcatcaatctacaacttttcctatggccgagaaatcgcagccctggatgttctaggatacaccgccaacgacttccaaattaccaaggaacgctgggatgccacaacagacttaatcacaccgctcaataagccgggcgagtttgtcattttcccagggaccgaatggtgcggaaactctgcagcaggaggagaccacaatgttgtcttcctggccgatcccgctacacacccgcccgaattccccttcgatcgccatgggaatgttgcccgttcgtttgaatggtccgagcatggtcccaaggacctcgtccccggagcttggccattggatgaggtatactgcacgtatgcgcgcaaggcagatgaccatatcctcattccccatgtcggtggacgccggtgcaatctggcatggcatcatcctaagctcggacgccttatcgagattgggagtacatggggccagtttgagtggctcctccaggacgcagtacgcagaggatggaagcttggagtctctgctaattctgatgagcaccgcggtcgatgtggtggcggtgttcctggcacagcagtgttcggcacccgaggcggtctcactggcatcattgcccccaagctcgagcggcgggatatcgctcatgcgttgagagcacgccacaccttcgcaaccaccggtcagcgactagtaggactggtccagacggcggaccagtctgctatccagggtgacgaaatcaagattgccaaacaagagacactagagctgaaataccagttctttggtgagaagggattctcgtcaatagaggcttttaatgaatctggcctgatctggcgaagacatttttggtccgagtctgacgcacccgccaccattctgcgggtgacatggggcggagcgagattatacgaccgctatcgtgaagctgtttggaacggaaccattacagtctcagataccagcattgaggatgttttgccatttggaggcttcgaggacaacgcagaagactttgcacgccaggcgggagaaagcaccgttgaattttcaagcaaaaccagcggggaccttgatggtgttcatgttgtttttcagggcaccaagcccccgcaaaaaatccgtatcgcaggctccctcggtggatatgtcaaagttggagaccccttggctggaaacccccacaaagcccagcctacattcgagctagaggcctcttgggaggaggccaagcgcctagatggaaaggtcatcgaaatcctgggtggtgcggagctgtttgtgcgtattgaagcaatcccgcaagtggagctgccacggcgggttcagggacaagcatcattcttccagacaggatcacgctcgatatactttgttggccgagagtggagtggagaaaaggtggtgaccagccctatttttatagactatgtatgaggctaaggttctcggggcttgaaacttggacgagatacctaaagtcctccctgtaatgtcagattgctgtatgccgtagtatattatatgtaatggtttacagatatagttgtagtcttgaatagtaattcatattgaggctaaaatgccctgttcttacgttggctccaagataaaagtgaatgtcaaataacaccccactgaatgatagcaggaagataaggaaatcagtcgacgccattacagccactccataagatacatgtgctgagagagaaaacaaactgcccttgattacggatacctccataggtagaagccctgatatgcccacgacatacaagaaaagcaaactaaagcaaaggagatatgatatgattggctctatccaggcaaaaaaaataccatagagaaccagtccaaaactccccaacaggaaaacatagaaaataaaaaaaaacctccagacaagccatgcagtgatcatccaagaccgtgctcactccaaaaattcttctttttgtgctgttggggctcacgcaataattcgacgccatttgcaatgccatgcaacaggttgcatccgtatgtacctttaaagaacaaggagaaaaagagagagacgaaggtcacattgataggggcatctcaaggaattgtgcgagatgttagaacatggtcaataaagactccaaaatgtcgagtccaatataagaagattgcaggtgggtacaatgtagtggtagagggagtagagatcgccaaaaaaaaatacgctgagtgtctatcataaaaaaatgaaaatgatagatagatatttgatatcagaaacgctgaacgtgcatatcatcaaaccgtgctaaagtgaagttgaactgaaacaaagaacatatgtacccattgagatacggaactcctcaagccgagctaccattagaggccttggaagctttactggcttccatgaccttattgaacatctgctgcagcttagcaccactggcatctttattcggccagtagttgagtgaaacataatccctgaaagtcaagtcagaacgggaaaagagaattgtgatagcaaagagaacttaccagagtcggacctctagggagggcatcgattgcgagccctccagagtattacgaatgaattcgccaattttcactagggtaaggcgaagtttctgggcccgctcgtttttgcttgggtaatttttggcagtgatcattgccacttgcttcaaattggcaacaataggcttgaagaacatgaacgccatgtcttctttattagagccgccgttctcatgccctttgcggcgacgaagctcgtcattagaggcatcggataaacgatggcgtggacgatcatcaaggccagatcgtggacgagagtcatggctgggagtatgatgacggtctccctccctgctggcatgcgtgtgggggcggggacgtgatcgatcggattcacggtggcccttgcggggattctccggcctgcgagaactagagggtgccggagaggcggagacactgccactaccggaaacccgtgagccacgcttgttgttgcggtggtgattgtcgactgcccttctcgctgtagcattgttgttgtacttgttccttagaacagacatgagatattcagctcgtcgaacaaggtggacagcgcccggtgattttgtcgccttctcctcagtctgcaggcgctgtgtctttcgctccactcggtgttcctcgaggaagaatttgtcgccaaggccaagctcagtgtcatcgcgaatttgggtccacgcaccaaacccatggcgtgcgatgccgacaagaagcattccgtcttcacgtgcaccccattggcagctgtagtccgccaatttggtagcctcggggagtcggaatgtcctgaaatcagccaatgctttgatgatgcttcggataaggcgcatatctggtggacgttcaacgatagtccatgcattgagtcgcttgactccgtgatggtcgaacaagacggccttctgttctttcttcgtggggtttctacccgattgtttcatggcctctaattggtccagacttgcttggacaagcgagtttgccttggcggtgatttcatgaagagcatcacgaacggtgcctcgatcgcgagtttgtaatctggcatcctccagaatgagatcttcggagtcatccagatcgccgtaacgaaggaatgctcgagaaagtgcacggtattctttttctccgaggggacgcctgggatccaacgagggactttcttcctcgccatcgtcgatattgacttgagctcttgcgagccgtttcgccttacgttcctctcgtgaatctgtcgtgtccgtgggggcgtggcgcttgcggggtcgattttgctcaatgacttcagcaagataatggtcatcatctttacgcttttcctcggccttgagcacttcgagctgttccttgggaatgatgtcgtcccacgtgagatcgtcaactttgatatcgacgaagtcaaacgctttcaagaattcttcaccgccgtcggcttgaatttgctcagcctcttcggtttggtgtaattctgcgtttgcaaggacggaatcaatatcaagctgctccagcttcttctggttgtcggtttgttcgaacatcttctggccgcggcgcttgaggatccgagagatatcatctgtggaattaggctcggcaaccacacgagccattttgttttgcatctccgaggcttctttgtcggtgacaccacgctggatggtgatgaactcgagcaagagcttgttgcgagctctttcaataacttcttcttcgatcgtatcctttgagacaagacgataaacgctgacaggccttgtttgaccgattcgatgagcacgcgccatagcttgcaaatctgcctgggggttccaatccgaatcgaacagaacgacagtgtctgcagtcataaggttgataccgagaccacctgcacgggttgaaagaaggaatgcaaagtcggtgctaccgggagcattgtaatgctcaattgccaagcgacgggcagcggacgggatagttccatcgagccgttgatatttgtaaccacggtactccatatactcactcaggatgttaagcatgccaaccatctggcagaagatcaacactcgatggccatcaacgctcaacttgcggaggagttgatcgagaagcatcatctttccactgctggtgatcatcgctcgaagaatatcttctcgacgagtactaccttccaggatctttgcttctgcgttggggaacataaatgggtggttgctagcctttttcaattccatcatgatgttcaaaagagactgcttcatccccttgttcccgtcgttgagcgctgcgtagtttttggtcaagatattcttgtagtattctaattggacatcggagagctccactcgaatgattttctcagtcttcgggggaagatccgactcaaccttggacttggtacgccgcaacatgtaaggctgaatggcggtagttaattccgcgagtttttgagacgctgcctcggaattcaaatccatgtcgacgtcgacttcaatgaggcccgggttgaggaaatccattaatgctgaaagctcagcaaggttgttttggattggggtaccagtaatcaagaggcgtgcctggcatttccattcgaacaacttcatgtaaagttgtgaatcgcgattcttgagacggtgcgcctcatccactgccatgaattgccacttgaattggccgaggaagggtgagtcattcattgcatactcgtaagttgtcaacagaacatggaactttggacgtttgggattcccatcgaccatcaattcataatcgcgcaacacggagcgcgccttttcactaccattgtaaacaacgtagttcagatccggtgtccagtgatcaaaggtatcagcccatgccggcatagtagacagggggacgatgacaatgaacggcccttgctgccgcctgacatggcgcatccagttgatgaatgcgacagtttggactgtctttcctaggcccatctcatctgctaaaacaacattgcgacccctaacccaattgaaagccaagaagtttagacctttgacttggaagtccttgagttctccattctgcaagaaagtaggggttccgtggatgggctcaaaggatttacgcgtggcgacatttatctcgttcttgtcggagataggttgtcgagcggtgcggtccaagaatcggtcaacctcacgctgtgcgatctcagaaaccagatcctctggctcccaagtacaggaatcgtagagaagacgtttccatttgacaaggtattccgtggtaccatcctcgctatcacgtacaccaatgacccgttcaacctttttgtagtcctctatggcctcgacgtctcgttcgcgatcgaggttccacttttcgcggtcttcaggaggggcgtcgacactgtactgcaaccgaatatcctcattgagtaccttccgaacataattatccacgcgtcgcgtgctgcggaagttggcaatagattcattgctttcccatgtagcatgatagtgtgatttgtcctgccacttgatacaaaattcaaagtcgttgcggtcgagatcatgagctttggggtcgacgccctccttgaggcggtgattcaggacgacgtcgacagcggggcgagtgtcctccacataactctccgcccagtagttttgtggaagatcttctgggtcttcttcaaacatggcttcgtcttcctcgtcatcctcgttgtaatttgacaccttcttagcggttcgtgttgagaagcgaacctcactcaatgaaggctcatagctagcagtttgttggagacgccgccttctcgctttgctggcacgagcactctttccaccatactcatcactgtcagactcggacagggacgacacagtagccgatcgagaggccttagatggttgctgggatggatctttgcgccgacgcttagtacgtggtgcaacatcatctgagtccgaatcagatgagtcggcgagatggcgcgtcgtgcgagcacgaccacttcgtcgaagcccatacagatcgggattttgtctgatcaggtcggtctcgctgactggtgacgatttgcgcttcgcaccgcggtcgggatgaggagatgaagagttttcacggctgtatgtgttggcgtcataatcgctgttgtcctcagctacgtcctcattttccgcgtccgaatcggcagacgcgccgtcataggagtcgtctgcggcatcgggttcgggggaggactcggagacggggtgggactccatgggctcggatggactgcgctcatgttgccttaacgtatcgccatccgcgtgggtatcgtccgcgacgggcgagagagggtagccattagacatggtcgaggtagaaggaggttcctgagcaggtgggatcaccatgccagaggctattaccgaggggcagtcagcattgaagcttgattcgggctaggagaggcatgaaagagatagggacgggtaaaacaatggcacgcgacccaaattgcggtcaaattgagcctaaaatctagcagaatgggacaggatattgacttcgatgaaagagtatgttttttgataacgggtgggatggacgcggccaggctggaaggcaaagcaatggacagattgatacacacaaccagactcagagaaagcagtgacacgctgcttgaccgacgacaatttaaacctgccccaatcggaatagaatagaggcattcaaggattcgtgcagtgggtcgacaagcgcggagaagtaccgcggcgaatgcttcggtcggcacgtctgtgcttgaggaaaagattaaatcacttacactccatagcgtggtgaccccgaaagcgggggatctgtcgatcaatgtgggaaagtaaatggtgggggggaggcgtgaagctggaaacttggggaggaggagacgagagacttggaagaactaagagttggggactgactggagggtttgcttcggtttggtttgcaggaaagtagacacccgatctattaggcatcaatagagcgtaaccctattgagactagcttattcgcttggcgcctggcacggcgtcacatcacgtggctagcggagctcggagaaaccaccaatccgaccccaggtcagtagccaatcaccgccttgataaataagtgacggatgtgtggcctaaggcatcacagcccacagaaagcaaagcaaagtgcattcaattctgccgcccctcgttcgttgatagtagtgtttcttcctgtcttatttctagtcgagtctgcgcagagatacttggtgcttttgctgagcccggttcatttacctgcgacagcgcttagtcggccaatctcaaccccccgcccctccacttggtgctgattttttttttttcaatccgcttcatatacacggtttctttgaaccacatccacccaccatgtctgacaagcttactcggtatgtttatggagcctttgaagtgcgatatcaccagctaacggtatacttctctttatagtattgcgatcatcaacagtgacaaggttcgtcgcgacatacccccactaataatattttctccccggttcatgaataactggctcacacctcatctttccaactttacagtgcaagccgaaggtacgcgattcgatataatatttcattgtgctcagggaggctaattagttccagaaatgtcgtcaagagtgcaagaaggcttgccccgtggtccgcacaggcaagctctgcattgaagtcgatcccacttctaagatcgctttcatctccgagcgcctgtgcattggttgtggtatctgccccaagaagtgcccattcggagccattcacattatcaacttgcccaccaacctcgagacccaagtcacccaccgctactcggccaacagcttcaagcttcaccgactccccatgccccgtcccggtcaggttctcggtctggttggaacaaacggtatcggaaagagtacggctttgaagattctcagtggcaagctgaagcctaacctcggtcggtatgacaaccctcctgactgggaggagatcctgaagtacttccgtggttccgatttgcaaagtaagcaccatagaccaagtacagcggtctttattcgaagttgctaactgtgacagactacttcaccaagattctggaagacaatctaaaggcggttgtgaagcctcaatatgtcgaccagattcctcgtgctgtgaagggacctattcaacaggttcagcagcttatctcggggcgcgctgcgctgggtaacgaggaggagattatggatgttctcggtgcgttgacatgctccaatatctcgaaattcgcttgctaatcttcgtccagagttgagacaagttgcgcaccgtgatatcggtcacctttccggtggtgagcttcagcgtttcgccattggtctggtttgcgttcagaaggccgacgtgtacgctcttccttcattagaattgatgccattgaatcctttaggttactaataattatctaggtacatgttcgacgagccttcctcatatctcgatgttaagcagcgtctggctgctgcccgtacaatccgcagcctcctccgccccgacgactatgtcattgttgtcgaacacgatttgtccgtcctcgattacttgtccgacttcatttgtgtgttgtatggtcgtcctgcagtttacggtgtcgtcactctgccttcatccgtccgtgaaggcatcaacatcttcttggacggtcacatccctaccgagaacctgcgattccgtgaagaatctctcaccttccgtcttaccgaagcgggcgaggagtttattgcggacaaggatcgtgccttctcctacccctcgatggagaagactctgggtgacttccacctgaagattgatgccggaaagttcaccgactctgaaattgtcgtcatgatgggtgagaacggaactggaaagaccactttctgtaagatgcttgctggtgcattgaaacccgatggcgctatcaccatccccaagatgaacatcagcatgaagccccagaagatcacccccaagttcacgggtaccgtgcgccagctcttcttcaagcgtatcaagactgctttcctctctcctcagttccagaccgatgtctacaagcccctgaagatggatgacttcatcgaccaggaggttcagaacctgtccggtggtgaattgcagcgtgtcgctattgttctggctctgggtatgcccgctgatatctacctgattgacgagcccagtgcctacctggactccgagcagcgtattgtcgctgctcgtgtcatcaagcgtttcattatgcacaccaagaagaccgctttcatcgtcgagcacgatttcatcatggccacctacctggctgatcgtgtcatcgtcttcgacggccagccatctgtggacgctcgtgcccagacacccgagtctctcgtcggtggttgcaacaggttcttgaagagcttggatgtcactttccgtcgtgaccccatcagttaccgccctcgtatcaacaagtacaacagtcaaatggaccaggagcagaagctggcaggcaactacgtaagttttctaagttttctatctcatctatggatgctattgattccattctaaattccttgctaactatattcaacagtacttcttggaagaagagaattgaaaagggcgttcacaacgagcatcgtcgccgtcgtcacaaacatgacggccgcgactatgagcagcggcgcaacaggcgccgcggcgattggaagatcatgtggttaatggggatcccaggcgtttgcagagcctcggcggttcagggcaagggataccgtcgccgcgccggaccctcttcaggtgccgatgacggtctctcggacgacgatggcgatgatgacgatttgaatggcaacagtgaccccgactagaaggtagtgacctggttcacaccctgctatccctggtctagtacgctcatttacttatgcgacctgttgccattcgtcagtctatcaacaaatgcctacatcgttattcgccttgcgacctgccttgatttgctctggatttttttatcatatccagagtcatcggcccccggttgggaacacatgcctacagatcttccactagcacctattaaattttaatggtggatgaggttcggcatagtttttttttccaacggagttatgtttgcattaggttggaggggttgggttccaaaaaaagctctccatgaattttatgatttgtttaaagatggaatgtcgcgtcggaatggattggcgatgaggttgttttcagaccggggatggcatagaacaggaaaccgctgaaaagctgccaggttcgttgcctcttcgtcgtgtagatagatagttttcaacccattgttgtgcatatgcttctcttgttcgtatttttgatccaacatatctctctagcaggcttctctagccacgcgcaccccgaattctacgaagcagggacactgccgcctttccttttgggtcgaggtagccatgtggataggcaagtatgatatatgattctgtagatatatatatagagagagtaccagtatacaagcattgtgtacaggagtgtacggatatatataatctgggagaaactggccatatcctgccagggagtcaaacggacaagtgggatctgacttcaactctttgagctatgtatgtactatccacggggagactataggtacacattggggttgcggattatttacctacgctattcgcgggggcgagccaagcccgatatatacaaaccgaaagaggttccttataatttgataaagggcagcatctgctagaagtgcaattagtgcggcattaggagagacattacgagatactcaaatggctcagaccctaacttttgacattcacccaagcgggagcgtgagctcggattatctggtgtgcaagtcggagtagtagatggtctagactggattactgggcctggaagaaagcaaatgagattgcaggatagattcagctcaatatcctacatgtgggttgaagggcagaaattacttgcatatggtcaagcgtgaatgagaatgtccatccccatctactcctcttcaatctctccttcctcgctgccagagtgaatggccttctcatctttcttcgcatcctcgatctcttcttccggaatagcggaccgttcctgtcgggggactctcggacccttgctgcgctcgcggctctcacgtcggtaccgcttacggctagccacactctcggtatcactgtcacgtcggcgtcggcggtcaccaccggccacactgcgagtgtcaacagcaccagtaccaccaccataatcaagctcatcacgacttccacggggatctccacgagtgcggtaaaggcgctcgcgttcgtcttcacgtcggtctgggtctctagcgcggggacggtcaaagtcacggtcccggctacgataacggtctccacgctcatcgcgacgatcacgagatggggaaataccgctgaccttgcggtaagttcgttcgcggtcggcctgtgccttgcgacggtctgcttcgtatgcatccatttccggggtccggttggtctggccgctgggtcctcgtcgttctcctcgcccactgcgatattcacgatcaccgcggtcataatcccgtcggcttccacggctttgagagtgtacctcacgctccctctctgcatcctcatctctttctttcaagcggcgaattgctttttcaaaggcagactcccgaatttcatcggactcaatggccttgtattcgtcgtatttctcaaggcgaggttggacttcagcccaggtgtcggtgacccggacaggcggctctaggcgcttgatacgagaacgcagtgcgtccacggcgcgacgctgttgacgatcggctgcatgcttttcatcctccgtacgtcgaactgccttgtcttggatgcgctggaaaatgagattgagaatctcagggtcaatcttggaggtgcgacggtcggcggacatgatagaattgaattcgtcaaacgtggtttcagtcgtaacttcaaatcgcttgtcctagaatcagtttgttaggacatatagtctttgcttggatccgagggaaacttacatccagaacatcgagcacgtcgttccgaggtcctcgcaaagcgcgttcttcttcctccaccatatcccagaacaaatcaagaggggtcgaaccaggctggcctaggatgccatgatatctggggtcatccgtaatgatcgggcagatattcatccacttggtgcccgccttgatcttaccctgggatttgagctccttaaggagggccacgaattgctctcggttcttacgctcctttctggttctggctgccttgtgttgctggcgagcatcgttgaaagcccgctccagggacttgatatgattttcgaaggcaatcaaaatgtcagacttggttagggatttgaacttgtcatcggtttggaacttgctgtcagactgaatgatggcatgagcctcggaccaacgcgtgtatggctccaggttgagtgaatccataatggtcatcaactcatccatggcagccttgtgcgtgacaaattcttgctcggcgtgagccttcttgagttcgaggatgtactcatcgaaaagctggcgtctctcgtcttcctcattggtagacctgaaggtagtctccccctcaatgatcggtcgaatcgtcttccagcggctgtagtattttatttcaggatggcgcttcagcatagtgttgaagtccgcgcgaagcttggcgaatcgttctttcgcccgctccttttcctgcatgcgaacctggaccacgtatttctcgaaggctgccttgcggtctcgcggatccttaagagcccggtactgcgggtccttgatcgtagcgcgcattgtcgcgtcccaagtccaatcaggctgcacgttgtggcgcttgagcagcttcatgaaggcgctctccgcctcctcgagagtatgatagtcggggtccatctgggacttgtattctggagcagcgaccatgctgttcgtttcaaacgagccgtatccaccgcgtcggtcgttgtatccccgctcacctcggtcacctcgatcacctcggtcgaagtcttcacggtcacgttgctgcagttgcgagaaagaggctccgccggcgacaaatgaaggggcactgtgaaggaattggcattgagggaagttaagttggggaagcacttacgcgggggtcgcctggggggcaggcgcctgtgcgagcgcgtttttgtaaacttcaggcatctcccatgtgctctgcttagtttctgagtgataccagtatttgcgcccagcatccgtagtgtgctccttccatggttgattcgcgagagcaagctataaagaagtcagttaagcgcgtaacattttgcggtcaggtacgcacctcaaccggagtcatcaactcttgcggcttggtccattgtgtggctttggtctggatattgtaataataaacgcgtccttccgcattttgcgcctgctgccacagggcagaatttgggttgcggcttggatccattgtgaacggtgttgaagagactaacagagaagtgaaaacggagcttcctcaataatctccgcggctgtgcgcttttggcacttcgcgtctaccgtatcaacacttatcggttatctcctgagctctaaacagccactttattgactcctttgcgacatccgttgtcgcaatgcctggtctggagatcccaggtgaattcttgcgtcatgcaattcttgataccgtcgtgcttcatgctccagcatttgacattgagcgcgccctgagttcggccctagaggacggagctgatgatctcccctctgttctctcgtcaatcccccaacggtctctattgttctttggtatgcactttcaaaggatcagcagagtttgcgccttactcattaatagcaattagatgaatttttgcctgtccgtatcatcttgagactatctgattgctcagaaacgaccttgaaacactacctgccacgactcgaagtcaagctcgatgtctttgctgtcgatccagcagaatcagttggcgaaaacctcacgccaactcgcgatataatattctcaggaattgtcggtcgagatgaggatcccctagtagtcttcaatgaattcgaaggtgatgaaggcagtgggaatcatgtctatttggtttggaacatcgagactatactgcgtgagtgatttgaatctttggattgacatgaacgtcactaacttggttgatagggcgtccccgtattcgaatccaacatccgtcactcttattcattgcgtctgccagtctgaatccggctgacgctcgccgtcgagagaattcgggggatgactatctcccctcactcgtccccgcatcgaccaatatgctgcaatctctatccactgataaatctttcaatcataaagagcctttcctccccgcttccagactattgagggttgtaccgacaacatacgacgaagacccgatttacaatatccagcaacaacacggtcacccctttcgcgttgtgccagccgcaagcgcaaggattcgatactctcggttaagctcctacacggctataccgatgaccgtggccagtcttgactttgaggtcaccccttatctggcttgcgaggtctcctttgacaaagcgaatcttcacctgtccgagggaacgattgagtcgctttcagacacaccgggcctggctcttcctattacttgccgtccgcgagacgatgtgaccctcatgtataaacttacaccggagtatggcccagagaccaatccatcatctaccgcgttagtcagcacgctggacatatctctcgaggcagcaattcttgtggatgacgactgcaagccacgtatttctatgcagtggagaaccaacgtcgatttctcagtcgccctaaatccgaattttggggggcccagtccagcgctgcaaaggaccaaccgccctaccagtctatcggtgtcaacccaagtgggtgtgaaccctcatcgaagctcattgcgagaacgagcatattcggtcaccgacgtgggtatcacaatctcattctctggacctgttcgtgtgcaagtgggctgtgtcttctcttgggatgtttttattgtcaatcgatcaaacgctcctcgaaagtttgccttgatcgccatacccaagcggaaaagcgtggacccacgaggccatgttgctcggccttcatcgtcatctatcaccagccggaaagaggaccaagtggccgaggcggtaactgacgataatatcgtgcatgcgaggcaaaagagtgtggctggtcaggaagtggaactgatcagcttgagcacagacattcgcgtggggtgagtattctctactgtgttccttttcgtttccttctctaagctgacgttttattagccccctcctcccaggaacttgccattcgactgaactcaaactccttcccctagctacaggcccacttcatttggaggcggtccggcttgtagatgtgaacacgaacgaaacgactgatatccgagatcttccggacattttggcggatgatcagcctcgctctagttaagagcagcctaacactgtatatatatgacatagagctatagctactttcaaagtggcctgtccttaacaaattattttcctcttgccttttatggtgtgtttttaaggctgacaactcattcgagagactatatgcgaccccatatctagtttgtaccttttcattgcccggtatctcctgtttagtaactgaactgcgatcttgaaacgccaagcgcctcgaacggcgtgaaagcattactattgctccaatgaggcggtgttaaagaaagatagatagaactgttggaatcggctggaagatgaaatggagttatacaatacaatttatatccacgaagtcaatgtatacggggtaggtgtagagtaaatacaccgaggcagcaaggtatagttcaacgaatgtgattggtggaaggagatcacggggtaatcgactcggcgtcgtgactttgttagtcacaaaggcgggaatttggagaaggccagctaactacatagttatcttcttccctacatatcatcatagtaactgggattcccttctgaatattgggtattgggttcaatatccagcttctcaactttgcttttcaactgccccggtttctttggtctttgcgtcatactggcgcatttggttccttcccagaaatcttgcccatcactccgctcccagtcgccagaaccctccaacatgatctgctctgcgaagcggaaagtcctggatggactgaataagagatatatttacggtcgcgtggtatgcaccttcctaaagcctgacatatcgtcacctctcaatttgattacggctaaccctgtggtcattatcttcaagcctttattgcacacgataattttcctcgtcgagatggcagtagcagcacgccttgctaccaaattcaatacctattatgctgaaaggccaggtaagcctctttccgcctgttcccgcgggatcacagactgacatcactactgtaaatagtgctcacgaccatggtcaccaacgctgtaagcttgccgcgatattgatcaccaaagtttggactgacagctgactaaatggatgttacaggtgcttggtggtgttgccgataccgttgcgcagctgattacggccttccggacccgccgatcgcagacaagcggggacgatttcctatcgatcgagatccccgactttgacaagcacaagccctctgctgtaggggaatcgggatatgttcggagctcattgccgcctttcgattttgagcgtctgacgagattcatggcttatggcttcttcatggcgccgctgcagttccagtggttcggcttcttgtccagagcattcccactcactaagaagaacccgacggccccagctttcaagcgtgtcgcctttgaccagttaatttttgcgccatttggtatgatccgcctctagctactttgggatgtctttggaccggactgatttatctaggtctggtggtcttcttcacctacatgacgatcgccgagggtggtggtagaagggcattgacaaacaagttccgtgatgtctacctgcctaccctaaaggccaactttgtgctctggccggcagtgcagatcctaaatttccgtgtcgttcccattcagttccagatcgtaagtctcctaagttctccttgttaggatagaacccatactgacttctcaacccagccattcgtctcaaccgttggtattgcatggactgcatacctttctctgactaactcctccgaggagtcctaattgaacgctattcaacgcgaaatcatgataacgattcggggtgtagaatgcttgaagtacactctttcttatgtcaaattatttgggagtttcggttggtcagtctggctttcatgtacatggttgcccgcggacggggtttgcatttcaaaaggtcagattttgcacatttgggaataccaactcggggttttgctgttaactatttttgtgatttgacttgaatgcttcaggagaattccatgtttccgcttttcagcttttcaacccccattgtgcttcacatgatttcgttggactcggaaaacacgcaagcatgtacggagtagcgactatggaatcagtagaggtaatcttcccagaaattcccgaccccgaggctaaagagggcctttatggcccggccttccccgtatcaacgcgggcagctctgacatcagtcccgcgtcagcccgatcagttctccggggagagtcgggtacgggaaagtgaggtacctattttatagagataccttgtaaacaatgatggcatcatagtgcgaacaagtaccttattcggtggaatacatcacctgtaggtaccccgttgctacgggggtgccttttcaccggccttgccccaccaaaactgacccctccactctttaatgatcgcgagctcaccgtggcctgattaagttctttctccttcttcttcttcttcttcctttcttgcttcttttaccattgtcatatcattagccatccaaaatgtctctcgccaacaagctccccattactgatgtcgacctcaagggcaagcgtgtcttgatccgggtaagcttctagctcattgagcttcattactcgcagctcctaaccgctgactgaaacaggttgacttcaatgttcccctcgatgataacaagaacgttaccaaccctcagcgtatcgttggtgccctgcccaccatcaagtatgccatcgacaacggtgccaaggccgttgtgctcatgtctcacctcggccgccccaatggcaaggtcaaccccaagtacagcttgaagcccgttgttcccgtgcttgagaagcttctcggcaaggacgtcactttcgtcgacgactgcgttggtccccagactgaggagaccgtgaacaaggcttccggtggccaggtcattctgcttgagaacctccgtttccatgctgaggaggagggcagctctaaggacgctgagggcaataaggtcaaggccgacaaggccgatgttgatgcattccgcaagggcctcactgccctcggtgacgtttacgtcagtatgtaacaccacgactctattactatttcttgtcgttcatttatctctaacatcaatccagacgatgctttcggtaccgcacaccgcgctcacagctccatggtcggcgtggacctaccccagaaggctgccggtttcctcatgaagaaggagctggagtacttcgccaaggctcttgagaaccctgcgcgccccttcctcgccatcctcggtggtgccaaggtgtctgacaagatcctgctgattgacaacctcctgcctaaggttaacagcctcatcatcaccggtggcatggccttcaccttcaagaagactcttgagaacgtcaagatcggcaacagtctcttcgacgaggccggcagcaagttagtcggcgagattgtcgagaaggccaagaagtacaatgtcgagatcgtcctccccgttgactacgtcaccgccgataagttctctgccgacgccaccgttggtgcggctactgacgctaccggtatccccgacggcttcatgggtctggatgttggccccgagagtgtcaagctctaccagaagaccattgccgaggccaagaccatcctctggaacggcccccccggtgtcttcgagctcaagcccttcgccaagggtaccgaggctaccctcgatgccgctgtcaaggctgccgagtccggttccatcgtcatcatcggtggcggtgataccgctaccgtggccgccaagtacaaggtcgaggacaagatctctcacgtttcgaccggtggcggtgcctcgctcgagcttctcgaaggcaaggagctgcctggtgttactgctctgtctagtaagtaaatgatgaaaaataggtggtgaagggagagtctacatcggctctccttttgtcctgcatgtttatgaaactgtaatgtatacagccaatgaatttccttttaattacaaactcattttccaaaagaggtctggattgtggtcttagatcagataactaagtgttgtgcttaggtacgaaaccgaagctttagctacgacgtcaagagacctcccgtggtcaattctcatgtataaggatgagaggaaattcctacggtaaataaataggaccgcaacgccatagtgtcatgaatatggttgaaccatgccaatcccattcacaactccacctcgcaacgcaactccaactgatacttccgttcatcttcctacataatatcattttaggcttgcgcagaatcataagctttgatattagtggaacttcatgataatcccgaaaccaagatctgcgctgagtaatgaatcgtaaaaataagtcaaaaggaccgtgtctcatttcctccccgacaagctcccgaaaagttcctgacaaatgcatgtggcaataaagcttttgaatcctcccattggttccaaagacaggggggtataatgtgcgagatgaaatggccagccaactcgataatgaacccatcccgaaacccgacgccggggttatttctttttcgtgcgcttgtgcaggttcgtccagtttaagccgatgcttcgactttcttcaattcttccctggatgaggtgatggatgttagtgggtgcggtgaaagaggggaaggcgggagctttggcggggatgggggtgcgggcttcggtggtggttttggttcaaagatgaaagagactttgtggacaagaagcatagcataaagagtatacagagaatcgggaagtattgggaaaggcaaactcactggagctgctttgagaagtcctccgcggcatcatcgtcatcccagctctcttcccacaggtgctcgctaccgtcatttgctgtcgagccattggcctgctcggcttcttcttggggccagtctgtgtgtcgtagagttagcttcgttgctgcagggaagcgcttgagtgcttggtcgataccttcaacggggaaatcctcgaactcgtcgtcttcctccaagacttggggcttcgcttgtggtgcgggctgctctgtggcatcggccttctgggtagttgggtttgacattgtgggagatgtgatagacgggggagatcgaaaggtagataggtggagatgtggacgtggatgtggcagctttgaggtcggaggtcggaggtttgacttagtaagaccgcgataaggcgataacgatgatgtagctgggagagaacctcggaaaacagcacagcgttgttgatttaaatggaaaaaaagaaagaaatgaatgagtgactccgaagaagagaatagaagagaatattagaaatacaaaagagtattatgttatgaaatagagcaaaaaataaccgatcgatgtagaattcgccttctataagaaattgcccacacggagctaccggcgaaaagaatccatgggaagagcctcagcactggggacatgctatattacagcttccccctccccctcgaccttccttctccacctccccacctctttctgtgtcttttcccttttctctttgttattctcttgtatcagtgatgttctcgaccgttgagtttccgcacagttgacatattgacattcctcccgatccggcgctctctcttttcggcttgatcggattgtcctgactgagaccatcgtggattgtgtccccattgaaaatttcattcttcatactcactgccagcggttttcgtcatgttgcgtgtcgggtcctggttgtacggcaagaagccggcgcagtctgtggactcaaaggttgagttgaaagactgtgagtggcgatacactctaggaaagccatgatgattattatgttgcatactgaccgccctcttctgagctagtgcatgatgcgctgacaggtatgtcttatgggaaatgtgcgcccctttagataccgactaatgcgatgaaactagctgcaacgctgattctcaatgatgatgttgatggcgcagagagtggtctctccacgggaacttcatcctttcacaatgtgggtatcataaatacaagctatgacgtagcacataccttgaggaaaggcgctgactcctgatcgagtacatagctgggtaaaggcgtggtcgcgtttgtccgggcaacattagggttcgagcaggagattatgcgacaaggtccattgctctttctatcttctaaatccacattttctgacaatccgcagcatccgagcgcctctatgaagcagaaaccagcgcggccaacgatcaaacccggtcccagcaaaacgcccaagcacccaatgcttttcactccgatatctatgctgccggtaccgaatacgcgttgtgccaagcaatcgcccaattgatgagtgcagtggttggggtgctgaatgaaagcctgacagaaagtatcaaagcgttctaccgactgaggaaggcttatatcgcactcgatgcgatcatgaagatggaagagaagtttatggagcagagggatatacgcaaagttttacggcccactgcgagtgatctctcaagctcgagcgctgcatgcccagacacgaagtcggagtcgtccagtcttctatcgaaaaagagcgcgaaaatggctaacatcgagaaatccgagcttaattcctcaatgaattcactggcgatctcatccagggcggtatctccagatgtttcaactccttccacacttgcgaagcatatccaccaagaccccgactcggatatcttcaagaatgaaatcgatgtttttgtgcactctggttccaatttctgctttggtattcttcttctactgatctctatggttccaccggcgttcagcaaacttctttccattattggcttccacggtgacaagcaacgagggctgagaatgctctggcaagccagcaagttccacaaccttatcggtgccatggctgctttggcactgctggggtattacaatggctttgtccgctactgcgatattatgcccgacccaactcctggtggatccgacgttgagggatacccgcaggagaggctggctgcgttgctggcggagatgcggttccggttccccaacagtcaactttggctgctcgaagaatcgcggatgttaggcgcgaacaaaaagctggacagtgctctggaagtgttgtccacggacaagaagagcccgctcaagcaggtagaggggttgtgcgtgtttgagaagagcttgaacgcattgtttctccacagatataatgtctgtgctgaagcattcattgaggtataaatcttatctggagatttttgaaacatcaagctaatcctttcagtgcgtggaactcaatacgtggtctcgttcattgtattactacattgccggatcgtgtcatgttgtcctgtaccggcaatcactcgacgacccaaagcttgcagcggaacatgctaaaaaagccaccatgtacatgcggaaggcacccgaattcgcggggaaaaagcgatttatggcccgacaactgccgtttgatatctttgtgactcggaaaattgccaaatgggaggcgcgcgccaaagaatggaacgtatctctggtggatgcgattggagtggacccggttgaagaaatgatctttttctggaacggacacagtcgcatgaccaacgagcaactgcaggagtcgttgacccggctggaatggtgcgaaagcgaaaagaacaagatgtggtctcgtgagggaagcgaagaaaaggcgatcctggagcttctccgggctgctgtttttcgatccctgtacagacacgaagaggcgaaaaagatccttttgacctgcgtcttgaaccacgagaagtctgtattcaagggccacctgaaggatgactgggtccacccagtggcgcatttcgaaatggccgccaacctctggatgcagcgtcctacataccaggccctgcatgggattacttcccccgaggcgtcggaggaagcgtccgcggaatctagggagacgaacatagagatcgagaggaagcaggtatccgagtgcaagggatacctcgacttcgctgctcgctgggagagctatgagctcgacgctcgtattggactcaaggttactgcggcgatggaagcaattaacaagtggcagagcattcatgcggaagtctaatggttattgtgtttgttcaatccttgggcagcgcattgttcatagctgcccaggataccttgtgtagcatacacacatagagtacgagtagatgttaggattagatttaacgaagttcattttacgtctctttttccatccttttctcctctttcaacatcagcacaatggcaacctcaccgtttaattcccccgatcaccgatctatgcaacgtcaatgcttgaatgtcattggccacaaggagctccactatgcgatagcactcggcactatggccaccgacgccgagtctctcatttccccgtccgcaaatgataagtctcggtgcttagatggtgatgccgagatttcatgaaagccgttgaactctccccaaagaacttcccgttagaattggagattagcaacctgacatattccgaacgagttctcggataacacggcttttgccatcggaggtccgaccaaaagtccccagagtcttgaagaaaacgaataaaacgctctgagatgtccgatatttctcagccttaccgttgtcatttctccgcttgacaactccgttatatccacttattatctccgagaattatttccccccgacttttctacggacttttccgagtctacttcatatatcttgtttcgcacattctccctctcttagctctagcgctggtcctgcgacacttcggtcaatgatccgtaataatggtcgaacggacagaacatgactgtcgcactagcgaatctagcgacgatatcgaaccgcatcgcagcgacgaggcagatggaatcggagcattggagaagcaaagtactgcggcatcgggttattcagcctttgaacaacagcgcggacagtcaatagtctcgcgcattcggagtctcgaggccggtcagacggcgaaattcactcatccactcagccataccaagacaggtcctgatgtcatcgtggatttcgaaggaccggatgatccttacaggccattgaactgggatttcaggaagaaggctatcacgacggtgctgtatggattaactactatgggtatgtcggggaaatgatgaattgtggggaatgacgctaatcgccgttatcaatctaggtgcgacgtgggcgagttcaatgtatgtccattttcttttcgtcctcacagtttatacattattaaactaacagtattagctactcaaccggccaggcacagatcagcgaggaattcggcatctcaaatgaggtcgctacactcggcacctcattgcttttgttcggcctgggattgggcccgctgatctgggcacctctgtctgagctatatgggcgcaaaacggcagttttaccgccatactttctcgcggccatcttttccttcgcgacagccaccgccaaagatgtgcagactattatgatcactagatttttcacggggttcttcggctcggcccctgttaccaacaccggcggtgtcctgagtgatatctggagccccgagcagcgtggagctgccattgtcggctatgccatggccgtggtcggtgggcctgttattgggcctattgcgggtggtgccatcgtccagagcaatctgggatggcgctggactgaatatgtgtgtcttccacgcttcgttgaagttgaaaccatatgctaatatctactagatcactggtatcatgatgctattcttcctaaccatggaccttctcttcgtcgacgagagctatccaccagttctattagtctacaaggcacaacgactccgcttcgaaaccggcaactgggcccttcatgcacgccacgaagaatgggacgtgaccctcaaagaaatatgcaacaagtacctggtccggcccttccaactcctcgcaaccccaatctgctttctcgtcgccctctacgcatcattcgtctacggcatcctctatctcagtctcgcagccttcccaatcgtcttccaggaaatccgcggctggaaccaagtcgtcggcgcccttcccttcctcgcctacctagtcggcattatgatgggcgggtgcatcaacctcgccaaccagaaattttacatcaagcgcttcaaagcgaacaacaaccgccccgtcccggaagctcgtctcccgcccatgatgctcggctctgtgctcttcgccggcggtatgttcgtcttcggttggacaagcgcaaaacacttccactggatttgcccgaacatcggtgcggtcatgatgggcttcggctttttcaccatcttccaggctgctcttaactacctcattgatacattccagaaatactccgctagcgcgatcgctgcgaacactttcctgcgctctatgttcgcgggctgtttcccgctctttacgcgcgctatgttccataatcttggcgttccttgggctgctagcgtgctaggcttcatttccgttgctctcattcccattccgtatctattctacaggtacgggaagcggatccgagcgcgcgggatatggtcgcgagattcggtttaatttttttgcgaattcattgtacatgtcttcctattaaatgggttatgcgcacatttgatcgcagcctagttggatacacacgcgcatgccttgcatttgatatttgataccctccgagcgcctccgagtttcagccatctcagattgacccctacaagcctattataccaggatgtggtctaaaagtcctacttcactactttttctacaggcataattttcaatagacaattttccgcgtattagagtataacaaagaagcagcaagcacaaaaataacaggttgaacaggaagaaaaatgtaaagagagaatatagtgagtaaaggcgattgaatgccgtatgtacccaatccagaagacaaaaagccaaagccacaagaatatggcgaagacaaccagaatataaaacatgcaacataaacactgagagaaagaaatagcaaaggaaagggtttttggtgtatcctttttttttttttttgtgattaacacctgtttttgcttttttttgtttttctccgcggattccagctcgatcatctgatatcaagctcgagtactgactgtgtttcgtccggtcagcttccgcgctatggtcatcgccttcgaccatgtcttcttcttttcgatgcgagcgacaggatcaggcaatgcagcaccggtagcaagaagctctgctgggatatcatcctggtgcttggcgttgtgcaaagccagaacggccatttggcccaagaaagaggggtgctcaataaggtcctctagacggaccttgagaccatcttgctcaagaagccaggtaagctgagccaggttgaagacgtcaccgcccagatcaaagaatgacgaatccagctggaaggcggattgctgggttagcttgtcatcagcgtctgggtcggaagccacggtggtgcggctgggcaggacctgatgccacgagcgagacagaatgtccgaatgcacaagcagctctgcgatggagcgcgacttgaggtgtgcgctgaggaagtgctcgtctgaggctcgggacaggtcatcgattgtctgcggtggtagagagcgcagcatgctcgcggatggcagcgaggctgtcgggttggcgacgagggattgcgcaatctcacaggccatgtcgagaaccttggatgcgaatgatggcatcacaggtcccttttcggagtagcccagagtgacatccaagcctcgttcaccggaggggcgtgacaccatggtgagatcagctaggttgtcattgacgccgacaccacccatacggtacttgttgttgtcaagctccatggttccttcgtagtcgacgttctggtggaagactgaggtagtgaagtatgtccagtcaggccagtcggtacattgcttgatgatctcacggaagcccagagactcgaaaggcatgttggagacttgctggtcctgaaggtagcggaagatatcgacagcggtccatttctcgtcgagcttcacgcgcaccgggatgacattgacacaagggccaacagtgctctcaatgccgggcactgtagcgttgcgaccgctgatagtcagaccaaaaacaacatcggactgagcagtcagcttagcaagagttagggcccaggcagcttgcatgacggttgcgatggtgacatttccgagagcgatgggcgaaatctcaatctttctgtgaatctcggtgaatgccccaacgttctggaacatactggtgccctttctgcggacgacctgggtcatttgagagcctttgagaagatcggaccagtggcgataatggtctggggtgattgttcctggcaacagtcgcaagtaaccagcaaagggagtcaccggaggcagcggcgtgccttcatatccgtgcttaatggcagccatgatcttcggcaagcatactccatcgtattgagtgtgagagaggcggaccaagatacgatgttggtcgctgcccttcttcttgacaacgtagaactgcacgtactgctcgccttcgcgcggtccgtattcgcgatctctctgttggagggtcatggtgaattcatcaagagcgcggtcggtctcgtaaacaaagatgctgggacggatcttgcgcagcacgacctggaagaattggtcatggaagcacacgaagactgtgcgcaggatatcaaaggccgcgacaaccttcaagcaactctcgcggaggcgtctcaggtccaatggaccattgccttccaaatagaagtagttaagcatccatcgggacttgaagagagttgccgttagagacatcgcctggaagtcggtgacaggaagtacgtccgcgatgccacccttgaaaacaccaatcttgggacatatgccgctctgcacagcggcatcgtcgatgcaggacggcctgagaatctctaggctctcggtagaggggctgagccctagtgtcgttggcgtgatattgagtaaatcactatcagcctccctggggccgccagacttgagatcggcattcagcatttgctgagtaacattcgcagctcgcactgttgctagcatgtcctcgaagacaggattgttgaagacatctgcaacagtaagaaccaggccctcttcacgagcggcgctgaccatcttcatggcggtgatgctgtcaccccccaacttgaagaagctgtcctggtgtctcaccacgttgggcgagagaccaagagctgtgctccaaagactccacaatttactttccacctcggccaaaatcccatcctcactggaacgggaagccaccgaacaaatacccgaatcatctgctccttgtatacctaactggtacggcgagtcggctataggatcagggtgaccaccatagcttgacaactcttccgagtgaatgggaggcaccgtcagctttccttctctcaacatccgactaataatctcatgaacacgatcatcaataattttctgaatagcactgctgtcaatcgcatctccggtcgactttgccttgtcagccagagtggtttgggagtgatcccaatccagtgactcgggctcagcctcggaagcgaatgtggactgcgacagagtcgcagcgggagattcaatgaagctagtgaacaccttggcgacggtgtcagccagagcctgggcctcctcgtcagacacaatatcgttccagtatctcaaaagaatgccctcctggcctcgggcaatctcaacattcacggtgaccgcatactgtattcagttagtagttgaacaaagcattgatagggcttatacttacttcgctcggatcatgtgcatgctgaagatcgaaggtcaatcccttctccttaggacccgcaacggagtgattctggattgacaaggtagtattgaagagcgactgtccttgccaaccaagctcatgttggatgctggccagagagcagctttggtggggaatgcagcggatataatcatcctgaacattcttggatacatccataagagtttgttggtcggagaactgaactcgacagcagagcatattaataaagattccaaccatgtcctggatgccattgacaggggcatcccgaccggcagaaaggtatccgaaacacacgtcatctgagccggtgaactgtcgcaggacgagcgcccaggcggacagagtcaagttggcaagtgtgacagagctgcgctcgcagaacttgagcagctcagggaatcgctcgaagttcatcatgacacccttgagttctctcttggcttcgaacacagccgacggcgcgaggtggcatgggtgaactccaccaaggtattgtttccagtgactaagtgcatcactctggctctgggttctgatgaacttgatgtagtcgctgaagcgaggtcctgaaccctcagcaatctttcgctcgtaggcaagagtcatgtcacggaggagtacatccaccgatccaccatcgataatggcatggttgatctccagcttgaggatcacacgtccggtgtttgttttgcaaacagtcatttggtgagaaagcttcgattggcgcattgcgtttctggcatgaagagagatagcagccaacttctcctctacctgcgagtcatgacattccacgcggaggatattatcggaaaggttcttgagcaccagttgatcgaaagatccaccagtgtagttgctgtcaacgaaaattgttcgcagcacaggatgacggtcgacgagggtttgccaggcgcgggcgactccttcggcatcaaccttgctagatttggcgtctttgatctcaaacacagtatggaacatgtaggcgttgggatcgcggagctgactgagcaagaggccctcctgcatgggagagcagggatatatgtcctcgacctcatccttgttccgaatgccggccttgcggaaggtgctggctgtgagcagctggaggccgtgatagttgatggggaggagggggtagtcgctgagagtaggctcgggggtagccgttttcagtgtgaggatatccttctcgagggtttgcttgcactggacaatccagcggcggattgagccctcatgctgcattttgtggttgtaggtgaaagcaacattgaggcggtctttgatcacaatagcagatacttcgaagagtgcaaaccgagcagtctcagggcccatatcacctgcgatagcaaagtctgagctgtcgaagacagtaccgtggtgatggaacaaggaatcggctcgctcaagttgctgcattttacccaggtaattgaaaaggatttccaatgggacagggaaatcagtaccctggccctgtagaagacttttcgcgaagtaaggacggccgttgtctgcgatcttacgcctggtgtctttgacacgcttgataatgtcgttgagggcaccttctagtgtcagctttttgtcggtaagatcaggtatggcaaacttacgagcttctgaatgcacttgcaaaggcgccatcgtggtaaaccagccaactgttcgcgaaagatcaatgtcggcttcccagggttctcttccatgtccttcattgtagatagtcggcaccttgcgatcggtgaaagtgcgaccgaaggaatgaatgatggcagacagcaagatgtcaacagtgtctgtgcggaagacactgtggcagccgtcaaggataaattgggtggtatcctcactcaacgtgaaggattccatcttgatatctccataaacattgggtaagtcttgcatgccccagtaaagcaagtccggcttctccggggtgaaaggcagagcaatcgacgcatcgtgcgtcttggctctctccgtctgcatggcacaccagctttggaaagacaatgccttctcgagtgaaagagatccagagacaacgagctcttcgagatcctggaggacgatgcgccatgagaccatatcaatgcagagatggtgagcgacgaggaataacacctggccaccagcgcgaaggttaaagaggtcggctgccaggataggcccattgagaggatccagacaattttgactgtcagcaatcttcggaaccatcgctcgggtatcgcccacagagtgaacgcggaatcggaaagattcatcgacctcctgtgaggttgagttagaacatgttgaatgatgattttgtattgagcttaccgctgcagttttctgttgccaggtgccgtcgctagatgtgctgaagcgtgcgcggaacatggcatgctggccgataacagccttaatagcgcgcttgagcacctcgccctcacaacggcgagtgatgcgaacagtgatgctctggttgaaacgagcggctcccttgaaagagtctgagcactggaagtagagtctctggacgggcgaaagcgcaaatccttcaccagacttctcttcacgccgagagacaggtgccttagaactggcggtttgagcaagttccttcacagatctgctctgcaagatgtcgtggagtgtgagaacaagtccctgcttgcgggcgcgggaaatgacagccattccagtaatgctgtcaccgcctgtgaggaccggttagtatgttgactgtttcgagaggatgggatacttgcccaagctgacgaaagagcgatcgacattgaccttctgtgtggagatattcagaacctgagcgaatatttcgcggacgatgttgagagattcattcttctcttccttttcttgcggcttctcttcggtcttgccacgcttgatacgatcgtaatcggccataatacgctcgtaggaggcatcatcaatgtcctcaatccaagcggtgatcttcttccggtcgagctttccagaaactagcatgggaagcttcttgacgagagcccacgtctggggaaccatgtaaatggggagctggttctcaagattcttctgcacttcgaccagctcgttgtaggcatgacgctcaagctcatcctcatcaacaagctcgcaaggcttgtcggagattagcgaagtatcggctgcgacactgttcaacgacatgacagtaaccaggcgctgcttgagagggccattcttggcgagaacgacgacagcatgccgagtaagagcatcctcagaaaggcgatgttcaatctcacccagctccatccgttggccgtgcaacttgacctggtgatccttccggctgatgtactgaatggaaccatcagggttgtagtagcaaagatcgccagtcttgtagattcggcgaggacccgggactgtgggcgtgaagtccttggtccaggcagggtcagtggtgaatgcttctgcgtttttctcgggatttttgagatactccctagccaaaggagtgccttcgagtgcaagttcaccgactgcgcccaggggagtcagccgatcgtggttgtcgggatcaacaatccaggtaagagtgctgggaataccgtaaccgatacgcccgggatcacgattggtggccacggcattatcgaccacagcaaagacacacgtctcggtcggtccgtacccgttcatgaggtgaacagagttggcccacttggtgatgacttcattggacatcttctcaccaccacaaacgaggtgcttaagggaaggcactgaggatggctcgattatactggcaattgagggggtgaggaaagtccaagtgacattgagtcgacggattgcgccggcaacatcgttgagacggtcgtcctcgctgggcacacagatggtacctccgagcataagtattgcaagagtctccatgacagcagcatcgaaagtgagagaggcgaattggaatactctggaggtctcatccatgcgaacccacggcgcgaatgccatgatactgctgactacgttgcggtgctcgacaattattcccttggcgcgaccggtgctgccagaggtaaatagagcgtaagccatattggagggtttgacttcagcgcggcgacgggcagaagacttgagggcaccgtaggccttgatggtctccttgctgatggggataacagtcttcatcactcggctgtagcggtttgtatagttgggagtgcaaagtatcatgttggcaccaacgtctgcgaggatttcctcatgtcgcgaggtaggatgggacggatccaaaggcacgtacccaccaccagcaatgagaatactgatgagcgtgaccattgcccaagccgacttgtccaggcagactggaacaaatacctctgggccaactccgcgagagaccagatagttggcaaagccagatgcgagatcccagaattctctgtaggtgaggtcgccatcccaggcacacacagcctgggcgtttggggtctcgtcggccttctcacgaatgaaatcttggacggtccgttccacagtgagcgggacacgttggttccacgtaccgatttcaaccttgtcttcagggctaatgacctccaagtcgccgagcttgctcgtgctgttcttgggcaaggcaatcaattgctggagaacatgggcaaattgttcagtgatacgcttagtctgccatccattgatcacaagctcatcatgatgaacagtgaacgaaatatttgtcttggtaataccacattccacgacaagagggtgtgtgaagaaatcttcgcttgtttcacgtttctcgtcgatccacattttattatcaagctcaccgtcacctggttggattacaagcaggttcttgaaatcgcagcccgtggcagtgtctttgctgagctggcggacatgttgaagaccagagtgtaagtgtggaatcatctcggtagtagactggtggatcttctgcaagtattgcatagtcaacatggtattgtcaacctggacacgagtggggacggtggtcaggacaggaccagcaatttccgcaacaccgggaagatcgatatttctgcccgacaaagtctcgccgaagcagacatcaccagacgccgtgtgggtagcaacgacgattgcccatgcagcgcggaggagcacagggatcgtgaagtcaacgctattgcgagtgcgggaagccttgatgctgtggtgctgagtgttgccagcacgcattgcatcaggcactgcactcttgttatgagggaaaggactgctcgaaaggtcgctcaaataagacttccagaatttgtcagactcttccatatcctttttcaccaggtattcaatgaaaagactgtaaggagtgccagcgcgtttgttctgcgaggcaaagtagttctcctcaaccttgcggaataccaaaggaatactccagccgtcataaagggcatgatgaacagaccacacaaagtagctatcagaggagccacgagggtgcaccatggcgtaaccggtcagagatgctccattgtgctttggtagatgaaggatgtcgttggggaggtcgtcgaacgactctgcttcgacccaggagatagggccgtccttaaggacaacttgagcgaagttcatggcttcggtatggacaatgcgagtgcgaaggatatccaagtctgccacggtttgttgccaggcttgtttgaatttagcaacatcaatgccagcagcaagacggaacgagggctgagcaacataagcaccgtgttgcttgatagatagcgtcaaaaggccctcctgtacggcactgcatggataaatatcgctgatgaggtccttggacacttcgcagttatcagtcacttcatccatcaagttctcgaggtagactccagagggcagcaatgagaacgccttgacgttctctttcttaacctcagcggctccattagacacgacgcaggtcttggccatgtcgatcaagattggggagttgaagatgctcgagacggtaagtgcgataccgtctgcttgagcagcaccgaccaggttcatggcggacaaggaatcaccacccagaccgaaaaagctgtcatcggcggtgacagacccggcttcaagctcgaggatcttttccacaagtgccacaagcttgatctctaggccggtggccgaggaagcctcccttctgtcagaggtgttgaaggtaatgtaagacttcagagtatccttggacaacgtctgcaccatggcccgcagtcttcggcggtcaatcttcccggaggaggtgaagggcaagttgcggatggggaagaagagtcggggcatcatgctctgaggcagaagctcgggtagagagcccttcaacttctgaatggcatccatgttagacacagagataggcagtagcaggggatcggctccagaaaccgtggggacaaattgatcgctgctgccgccgttggagtccggatcatgcacggtgaagaacgcggcgagcccctttgcgatggtgcgttcctcgggaacaacaacatcaacagcgacctgagagtcctcgggtaggcagcgaagacattgctgttcgatctcctcgagttcgatgcgctggccattgaatttgatctgagtgtctttgcgggagatgaaggctagactgccatcgctgttgtagcgaacaagatcaccagtccggtacatacgatcatttcgcttgaacacaccctggaagccggcatgacggttccaaacaggattctcgaagaaagaggccttcgtcttctcctcgttcgcaaggtatccacgggcaatgttgcttccttcgaggatcaactcgccaacagcaccaacggggagaagtcggttggaattgttcggatccacgatccagactctgcagtttgaggcctttccaatagatgtgggatcatcattgacacgcttgccattccaatcaaccttgacaccagctgtggcaacgacagtggcttcggagggaccataggcattgatgacgcaccggtctccccagcggtcgatatggttagcgggcatcttctcaccacctgtgatgatgaccttcaacgtgggaacgttcttcggctctaaggtattgacaatggcgggaggtgccgtgatgaaggtggcttccatacgacggatggcaccacccaagttgttcatgcgttcctcctcactgggaatacagacacaaccaccagtcatgagaaccatcatgatctccagaacgctgacatcaaacgtgtagttagaaaattgcaaagcgcgtgttgtaggggtcatgtgcagcgtatcgatcatcgcgatcgcggtggtgctaagggcagtatgctcgacaacagtcgccttcggctttccagttgtaccagaggtaaagatagcatatgcagcactgttaggggtagggcgagcaccaggcaaagccaaaggcgagtcgggaagttgggagattgaagtctggcagacggcaaacgatttcgcgcagagcttcgaaactttggtgtggacagaagatgagcacaagacaagatgagtaccaatttcgtcaatgagcatcttcagtcgagaatcggggtgggatgggtcaatcgagacgaaagctccacccgccttgagaacagccatctgggcaactacagcccaagcggacttttcgaagcacaacaccacgaaggcttcgggcttaaccccaagactggagagatggcgagccaagcgactggaaacaatttcaagctgcccataagtgaaattcttgtcccaagagcaaatggcttccgcacgagggtgaagcagcgcctgttgctgaatgagctcgtcggcgcacttctccaccctaggaggggatgcggcattccaatcgcggatttggcgaactgagcgctcagtgaatacattgatatctccgattgtgcggtcacggaggttgtgagcgatcaaatcatccaagacttggtcaaacatgtccatgacatggttgacctggaaggaggaaagggtttctgaggagtaattgaagtggatctcggcgtacgaatgcgagacttcagcttcaaccagaattttgtaagcagtggatgtgcttggctcacgggtacttcctttgggaagattggaagctatgcgataggaaagggaggtattgaagagggttgtatcatcgagcccaagctggtgtttgacggcgtctaacacagcgacgtttaatgcactgttctcggagtctgtctttgctttttgaagagtctcttgcagcttttgctcattctgcacgaggaagcgacaggtggcaactccctcatccgccagtttcgtgtccaaagctgaggcagaatacccaaagcacacgtcgtctgagccggtgtaccaacggagcacaacggcccaggtaaactggaaaagagtttccacaggaatgccaaacaatctgctgaaggcatgaatgttggctgtctgtttgctgagcgtgcgggtggagcggccattgtcgcttgtcgcatgggaaaggggcgggaaaacgcagggctcaacatcggcgagatactccttccagaaagcgacgttggccccggaaagacttgcatgtcgtgaatcccgattaccagccttggatccgttccaacgcttgatgtcgaaagcctcgaaagcattgatcgaaagcgcctgggtttcgattctgagggcctggcggtttagctttccagaaacggtgaaggggagggaggatatagggatgtaaaaactcggaaccttactaccaggaagactagtgctcagattggcgtgcaggctatatacggcctctttcagctcaggtgtcgtggactggaggacgcgatccccaaaagtgcctgttgtggtatccgaagaaaccacaaaagcgacgagggcattggtcttcacgttgtcacgttgcagcggaacgctctccacaacgcacttcctcttgttgcctaggaaggaatcaatgcgcgcctgagtctgaattagctcgctagccaaggcggatccattcttatcgttctttcggccgaggaaaacaagggagccatcagacttgtaccgaacaagatctccggtcttgaataagcgatgttcatcgccttctagttgtccacaaagccaggaagcgtcgttgaaaaagtcacagctctctacagactggtcgtcaaggtatccccgagcaacaacaggtccctcgagtaccaattctccaacactgccgattggaacaaggcaattgtggttcgaggaatcaaccacccacgaaacacaagaggtgctctttccaatcaggccagcctcgttgtcgtcctgggaacagaacacgtggaaggaggcagccgagctctcgcatgttccatacaaaacctgcagttggagatcatcggtctgccagtggtccaggacactctgaggaacgacttcaccgcccagggcaatcgatcgcagtcccggaacatccttgggagagaaaaagcttgcggctgttggggtgatgctagcaacattaacatggagggcattgatagaggtggccaagttggcggggtcaatatcagccgggatgcaaaggcaaccaccccacatgaaagtgccaaatgcctcaacaataaatgcatcggatgtgtgaggtgcaaattgcagggtcctggagacatcggcaatcgccatggtggtagcgaatgcctcggctcgagtcatgacagttgaatggtcaaggacgacactcttggccgaaccagcggttccagcagtcatagcgacgtacacgatgtcggatgattgtgccacggggttgagaacctcgtcggcgaggtattcgaggagagactcgcttacagggatgacgtacggtacagcatcctcgagaacctgggccttctccggggaagccagagcgacttgcacagcgttgtcgacaatccaattctcaacaagagccaaactctggggtgtatcaactggaatacagccaccaccggctttcatgattgccagtgtggagactatgttccacacagacttctcgaagcagatagggatcagggtgccaggaccaacaccgaatgtgacaaggtaggttgccaaacgagaggagaattgatccaacttcgagtaagttaagttgccatcccaagcggtgacagccaacgcatcggggagcttcttcgccatctcttgcacaacctgatgagcgcacttctcaaaaggcttgggagtcttgctgttccacgccatgatctgggtgcggttgtcgtcgctcaagctgtctagctggcggatttcaccgtcaatgttcgacacgacgttctcaaggcaacggagataggtattggccacattggcagcctgtgaatcagacaggttcgtggtccagtagttgaggtcaattcgagcagtggtatccatggcctcaatgttgatgaaaaccgggaactcggcgggatcatggattgagccaacctcaacacactcaatgtcactgctgacagcatccttggaactaggaagccggcggtaggagacaccggaattgaacaaattcgtgtcagacagcttcaaagcatgttggatatcaatgagcgaagtgtgtcggtaaggaagactttccatgtagtcgttctgtatttgatgcagtacatcactgagcttcgcgttatcaggaaccttcatgcggcaaactagaaggttgataactggtccaatgacccactggacgccctcagcagagacatcacgcagagatgccatgtagctgaaggagacatcttcggatccacagaaggcgcggagagtgaggccccacgcggcattgaagacatttgcgagagtgattccgcgcgtctcacaaacagtttggagttcactgagcgcgccgaagttgactggaatggaccgaagtgcctttggcgattgttggccgtcagtgagggcagggaagtggcacggcttggcttggtccaagtacgagcgccagtaattgatgctagcttcctttggtgcatcctggaggtactgaatatagtccttgaacaaaggctgagggctttcctcgagtctgccagcgtatgcgagctgcaggtgacggaggatgattgagatagagttaccgtccatcgcagcatggctaatctcaaggcgagcaaacaaccttccagcgggtgtctggcaaatagtgaagcgatacgctggttctggctcgctgtaatccttgggatcctccttgtcaaaggtggcaatcacatcatcttccgatgaagactgcaaaaagataggagtaacatcatatctcttcagtacgacttggcagaaggggtcccgaggagtgaggttctcaacgaagatggtgcggaacatcgcatgatgagaaacgacctgctgccatgcattgatcaagcgatcaaggtttggctcgctagatccggtggcccgaatttcaaaggtgtcgtggacagcgtagtaggagctatctcgcttgcgaccaaggaggataccctgctgcatgcgagaacaagggtagatatcttcaacaagatcaggggactcgatacccagagcaggcaacttctcattgagcaatttgtccaaggtaggatagctcaacgacaacatggggaacgagctgagagtcaatcgtggctcgagggtgggaagctgctcggagagacttataagcagcttctgacattcggaaacccattggtgaatacggtcctggtgttgcataaacctgttgaaggagaagttgaatcgaactttgccggccacgaccatcgcagagatctcaaacagaccaaagcggggagtatcagcaccaaagtctgcggcaccgcctccttgaccagcctctccggccatttgatcaacaagctggaagagaccatctgtcctctgtagatctcggtgttgtccgacgtagttgaacgacatctcgaaggggtgggggtgctccgactctcgatttccctcggctggcagaacgcggctggcgaaatctgcgcgaccattatccgagacacgacggcggagatctttcacctgcatgagggtatcaacggggttgtcggaattgtaggcagagacgaagattgggtgcagaatggtgaaccatccgacagtatgcgagatatcaatggatggatcccagacttctcgtccgtgaccctcattgtagatagttggaagagaacgatcggggaaggctcggccaaatgagtgaagcatagctgccaggaagagatcaatcggctcggtgccgagagctttgttacattccagcagaattgcattggtgtgggcagggtcgatctcgaacgaggcacaatccacattaccatatgtagtttgagtgtccttcagtccccagtagccaaagtcggttggagcgagagtgtcggttgcaactttgtgctcatcccggaggatcttgcagtgctcagtctgcagacggcaccaggtttggaaaggcaaggagctatcgctggtttccgtcttctcgggatttaggatgatgtcttccaaatcttccagaataattctccacgagacaatgtcgacaaccaagtggtgagctgtcattgatagaacattaggctggtccttcaccaagaaataatcgaccgcaagcaacggtccagagaagcagttgattgaggattggctgtcagcgacatgagtcttgacctcgtccatgctgccaagattgtgcatccgccatctgtaagatcccttgatatcgcgagtgatgtgttgattcgatgccgttgcgaatcctgtgtcagtaaatcgcgcacgcagcatcgagtggcgagacaccagagtttcgatagcctttcggagggttgtttcatcgacgggcttgttcaaacgagtgaggattccttggttgaagtgcccttgaccctccttgcgtacaccaaagtgaaggatctggataggcgacaggctgaatggttcatcgacagcttcctcgtaagtcgtcaggtgatcgattgtcttcgcgcgagttgcgaggtcccggattgatttgctccgaagaagctcttgtacggagagagaaaatcctcgcttcttgcagagaccgatacatgtcatagctgcgatcgaatcaccgccgagggcgaggaaactctgattcaagtcaagctggttctggggaatgttgaggacacggctatatacagcagctaaagcatcctctatgtcgttggcgggctgtgaagcctctgtgccgacgattgcaacagaggtattgttctgaagatcggggtcattctccatacctgcgacccaagtggaaatgcccttgcggtcgagtttccctgatggcagaagtgggagagcttcaacacacaaccaaaccgcagggaccatataagtggggaggcgacccgataggcgctctcgaattcctgggacaagctcagcctttttcgaggcggagacaagttgtagaggctccaaatccgaatcagactgttccgcaagcaatccggtggaagagacaactgcggccaaccgtcccttggagaaaccagtcttggggaaaaagacagagcaatgagtgacgttcaaatctttgctgagctgattctcaatttcgccgagctcgatgcgttgtccgtgaaccttgacctgcgtatctttgcgaccgatgtaattcagggcaccagattcggagttgtacctgacaagatcgcctgtcttgtagaatctacggttagagccactttcagggtccaatgtagtccaagcagggtcgtagatgaacgattcgttcgtcttttgtggattattcacgtagcaccgggccaggggtgggccctccagaagtagttctccggggcagcccacgggaaccagttcatcgtggttatcagggttcacaagccaagtccgcacaccaattggcaggccgatatctttacaatcggtgtcaggtgtaacattggaattgagcacggatgccacactggcctcggtaggtccataaccattgaccagtttgattttggaccaagtagccagctgggactgcgacattgcctctccggccaggaccaaactctccagtcctggaacattctcgatttcaataaagccgatgaatgacggggtgaagcaagcttgggtgactcgcatctcgttgatggtagtcacaatatcgttgaggcgagcttcctcgctcggaatgcacacacatgcgccatgaatgagcggcgtcaacgcttcggccaaactggcatcgaatgtgtgagcggcgaattggaggcatcgcgactcgcgataaatgagcaaaccgggtccatgcaccattgcgccggacaaaaacgcgcggtgctccaacagggttccctgcgagacataagtcagctactcctgcaggcaactatatttaaatattcacaaagggctaaccttgggttctcctgttgatccagaggtaaacagaacataagccgcattttgacccgtgacaccggatgccagattgacattctcggcggggtcagacaggggatctagagtatcagcagaaaggggtattaaagtcttcgcaataggacgaagtttttcggcaagatgctgagagcacagcacaaccggcgcctgaaccgattggatgagagcttgtagtcgggaagttgggtgagtcgggtccaatggcacgaacgcgccgccggctttcatcacgccaagcattgccacgatgttccatttctgccatgtcccgtcagtatgcctgcaacgaaataaattctggaacattgatccatccatgaaacattccactcaccgatttatcgaaacacaaagccacgcggatttccggcccgactccctgcatgcgaagatggcatgcaagcttcgatgcttggtggtccaactcggcgaacgtcaaactgccatcccacgcacacacagcctcacgatcagggccgctcaacatttgatcgtggatagcctcatgaatgcagcgatcgtgaagctgcggcatggtggagttccaattgcgaatgcgttgccagtcgttttccgagaacaaattaagctggctaatagcggtgttctcggaggaaaggactttggcaagcaattgctcaaaaatgtttccaatactcttcatctgctccccggacatgtcacctttgtgccattcaaggaagatgctgatgtctccacgcagcaccttaacatgaagacggacttgacactgcgcattgttagagaattgcgtttctgtctgaacaaaatcaggttactggattaactaacctcgtccggaagagctgttgccaaaataggttttgaagaagaagcagtgtggtcatatgtgcgcagcatcaagatggtgttgaaagggagatatccctcggaagtgacgtccgagctgccatcgagctggcgattcgcactgtctgcgcgcaccttatctacaattgccgtaagagagtcgttgtcgttgatggatatgcgaattgtcgaaatattgacaccggtagaacgccgtacagatgatttgagagagcgcgagtcgccctcgagatgttggtaaccaaagcatatatcctcggaacggatatagtaatgcaacaagagagcccaggtggctcgtagcattgggtccagacggccttcgttcgatgcggttaataactgcgcatgctgagcagccgttggtctcgtcttcatcgagactgggcgtttaggcccgtcaatcgtcgacgcgaaccgcggaagataacacttggtggattgagccatgctgtctaatgactaggtattaccaggctgccttctatttcgttttgtgttttccggtcgataaagagagtgtgggcctaaggtacgaagaacgaatgacactattagttcgacagtggttaaagagcgccgcgaattcggacggtctcgccttattttaaagaaccaacaagttttttttttttctaaaaaaaagtattattttcctaccccatcgaaaatagctacgttcaccggccggagactgcatgggccacactctcaagaatccagtaataggcgctatattccttgcatggggtcgagatgaaagggagaaggatggagagagacaatacgtggagcaggcgtactttggcccccctgtggaaccgattcagactcttttctgctatgtattcttttttcttgttttcttttatttccaagcgaattgccatgtcgaatttcttatcttattttctattttgaactgccaatgtaacccttagaaaaggactagctcactcgacctaacaccaaaaggtcatcatgcaggggaaaggtccctacactatctgtctgtgtactctgtactccacagcaactgctctttcagagcccgcagtttccccgatctagagcccttgcggtctggaacgtgggaatatcgattcagagcaagccgtcaggggcgtaaggcttttcaactccgaatcatgctgaaattggatggcgttatcgtccacggggtgctctttattttttgcccttatccttacaaggttgcaatgctgacgttgctggcgttactggctacctgggcatatcaaaccgcttatagtaagctggtggtcatatacatgtgcccagctaggatgtagccgttaccttcacttcacaccgcggatgaaggctcttgcttctctgctgcattggcatcgccacagttacacgggcctcgtgaggcgtttataggtcacgatgtacaccgactggtgtgcacatggcactgaccccggactacttacttcaatctcacctctactttgtactttagaagctctggtgatgggtgcatggcatggaagtccgaaaactggggactgtatgtatcagcaaggtgtggcgagctaggacgggtcgaactagggatcaccgcgcagttcaggcacgaccgcatcgagtagcggaggtggcgactgggtccggtgatcgggcaaagttaatttcccggcacctgacatgatgtcttgatcttggaagccttggagaagctcaggggatgttcaggagtcaagaaaaacccaaggaaaagccggctgtgggtcgcgggtccgatacccgatctgaggtcatcaccctcttcgttgacgggtatccaactctctcagtctataaatcagaatatacgggggtagctatgacttgcatcggagggataccgttgggaacgacacactctaagaccttcttcggcatagccggcgattggatctcagaatgaaactttcaagagttacaatttacggaggaaatccatataactaatctaatgggtatatgggtacatgatgtgtaagacacaacagaccacgaatggtcgttcctgcaagggcctccaagggatacgggcgtatccgaacccggagactcgtcgacttggctgtatttttataacagttacatccacaatacattcaatagctcaatgctagacgagaatatgcgcataaactgaaagtgggacacaatatctcactcggtagctactccgtacggttcctccgatcatacccagttgcgtcaaaaacatgtcctcatggggtgcagtatgtagattgcttttttccttcctcgccttctcttctcttttcttgttgaaaactcttctcggatctgtcgctctcgtatgagcaggatctggaccgtacctttgtatgcccactattctcactagtcaagatatcagtcaagatttgaagaagctaagtggatatgagtggatgtacatcccacctatagggatatggcatttttccctcggagatccgcacgggaaagggccgatattggcaatacacaaatctgcactagttgacacttatgacaggctagcctagcgcccgcagttcggcgtcgattgtggactaagaacaatggaaccacctaacaggttgatctcattgttgatctttattgatcgtcagatagatcactttatcgggttctgcacgctttgagccccaacgtaagagggaaaaataaacgaaaattttccaagtgtccatggacatatgggagtacgaaatataccaaatgcattacagaaatgtctctccgtcagacagtctggaatcaactgcagacgtgagcacaattggcacaggtgtactccgtaaatcagtggggtccattatgcagagtatttgccacgcatcaaccacgcctcgaggacaagggggaaatgaaaatgaaaaccggcttaccctggtcaatcggctccatcggggacgattgttcgtcaggcactacagctgtaggtacatatcccgacttatgcacattggctcagtgagcgccacgcgaaccacatcacgtcttggaatatgcagcattcaggttgggcggtcgcaattgaaatccgtaatgccgatgacagcagaaaactccgaaggattcaatgtgggccacgccaaatggttgagtgaaaaggaacgattggcccggatgaaatgaatatgcgaatcctacggccactacggaggcactaggagcaaaatgtgacgccatggcggttggagttggagattggagattcaattttggagaattatgattgtgacggaacttgcagaaaccaattgtattatgcatcttatttcctatgtttttctccagatgtggaagattcaggcgatttacttcattcgccgtgtctaacttcaacttctgcggtgaagcagagttcgagaaatatatatctacgcactgagactgtaagcttggagagtgagaataagaataagaatagaaatagattacattaactagttatattaaattcaattaataataaacactgtttcaagccagatccggcagatctcccatcctacagatcttttttcgccctcacatgagcgggaagtgattccattgccctaactcgacacgcgcccagatgcccagacattcgccattgcaactcattggaggtcattgaggtcattggactcattggagtctaattattttctttctgcaaggtagcacgactccctcgtgtcgctcgggatttactcgaggtttccttgactccagggacggaaggatagcgatgccgtggatatcccccacatcctcaaggggggcgaacgagcctatccgcaatttgtcttgggaatcaggaccactattgatgacggaggtggggtcatgaaatcacagtccaatctcccaaggtcttatagtaaaacaaaaacaaaaaacaaagaaaaacaaaccaaaccaaaccaaaacagatgcagcaggatggatccatacacaccgaaccgagtctagatgagctcacaagtcattcagtaaaagtattgttgtaagatggttgcatcaagagctgtattcattcccgctttgatgcagccaaccagtagtagggtcaaaagggtagtctcggtgttttagttctcctagatgcaatgagctcctgcccatagggatgcggacctcgtctagccctaggtacctttattatgcagatctagtagtaaagctgactgttcttatgtcactttttgatccatccgatctagcccaaaaagccgcaagttccccgagctcatgcatgttcttttaaccatacactcttttgacttctgattccccgtgtcgctcgttactacgtctttcttttctttaaccatccttccgtcgctaggtggttcaggaacagtcatgacatcttccggcttttcagggccttcgtgccgcgatctagataatactttccgtattgatgctgggtcctgtcgcggaggattcgatttctctcttttatttgaggagactatcctcgagatattacctattctattaatgctaattattattcctggccgtctgtggattctcttgcaaaaacgaaacaaggttgtgggatcatggttggtgttcgtcaagcttgtaagttgactgtgttgatatactctgctttctgcagttcggatgcatcccccccccccggtctttgcaattgacaaactattggattcaggatactcttaactaataaacatatctaaacaggcggcttggttggcactgctgggtcttcaaattgcacaaacagccctatgggcccttccagcagccgacattaccaaagcatcggttgcagccaatgtgctcctcacagtcggcatattcgcgctcgtcctgctttcttatgcagagcacacgcgttctgtgcgaccctccttcattttgaatacctacctgttctgcagtttgcttttcgatatcgctcgttctagaactctgtggcttcgcagtgtggacagcttcaatgacatccttgccattctcgctacagtagcggtcagtgtcaaagcggttctgttcgtgctggaggctgtggagaagaagcacattctcaaatcggaatacgccaattatcctccagaagcgactgcaagtttctataaccgtgctgtgttctggtggctgaacccactgttcaagctcggctacaccggtgtcctgcgtgtggaagatctcttttcattggataaagaactgagctctgagcgcctactgactcgatttgatgagaaatggagcaaaggtaaatagccatccacgccgatatgtgagtttctatgctaatatttctctagtgactactaagtcgccaaacactctccaatgggagtcattgaaggccgtcaaatggcccctgcttgcgggtatccctgccagagcttgcgtcgtcgctttcaacttctgtcagcctttgctcttggagagatcgatctctttcttcaattcacctgtcaaccagggtacccaaaacatcggatacggacttattggcgcctatatcatggtttatggtggactcgcaatttcaatgggccagtatcagcatctcacttatcgcggcattaccatggtccgtggtgttcttgtcacaatgctatacaagaaagccagctgcttgggccttggggagatcgaccccgccaactcgctcactttgatgagcgcagacgtcgagcgcatcacacagggatggcagaccatccacgagatctgggcgaactcggttgagatcgccttggctatctaccttctcaaagttcaacttggagtttcctgtgttgttcctgtttgcgtcgctgtgtttgctttgcttggatcgttggtcgggatgtccttcgtggttgcaggacaagctaagtggctggaagctattgagaagcgtattaatgctacttccgggatgcttggatcaatcaagggagtcaagatgcttggcttgcaagattccttcatgaagtttgttcatggtcttcgcatcagcgagttggatatctccaagaagttccgtacccttctggttataaacatgggttttgcctggttgacccggatttttgcccccgtcttcacctttggtgtttatgtcggtacctcaagccagcccttgagcgtctcccgagctttcacatctctgtctctgttctcgcttctggcagaccctctcttgaccttggtgatggcacttatgtctttcgccggtgccgttggctctttccagcgtattcaacagttcttggacaaagaggaccacgtcgatcgcaggaataactcgcagactttgttcctcgatgatctcactgaaaagcgtgtgctgtcgaaggctaaggaccttgaactttcttccatcaactctgactctctcgagtcgctcaagcgctccagtgccccgccttctggaaacgccgtcgttgtccagagtggaagctttggatgggaagcggataaggatccaattctcaaggacattaccataaccatccctcaagccagcttcacggttctcattggaccatcaggatgcggcaagtctactttgctcaaagctttcctcggagaaatcccctgttccgaagggaaggttgcactcgccttccccagcgttgcttactgtgatcaaacgccgtggcacatgaatggcaccatcaaagaaagcattgttgcgatgtccgactatgatcctcaatggtatgcgtccgtgattcgggcttgcgctctggaagaagacctctcacagttccctcgtggggactctgctgttatcggaagcaaaggtattgccctcagtggaggtcaaagccaacgtattgcacttgcacgagcagtctacgcccggagaaagattatgatcctcgacgatgccctcagtggtctggacgctaccacggaaaatcacatattccacaaccttttcgggtcgggaggacttctgaaagagattggaactacagttatcgttgcctcatcttccgtcaagcgccttccctacgccgatcacatcattgtcttggaggaaggtggtcgggtttctgaacagggaagcttcgctgctctgaacaagactggtggatatgtgtcaagcttcggactcgggctgcctgattgggagtacaaggctaagcgattttccgacactcccagttacgacagcatggacagtatccaaaaagaaaaggaggcattgatcgaagagcctgagcaccatgataggggtggcgatctcggaatctacacatactacatcgacgccatcggatggctccctgcgactgtcttcatggtcgcaatggccggttttgtgttctgcatttcattccctagcatctgggtaaaatggtgggctcagtccgacactgcacaccataagcaagagatcggccattacgtgggtatctatgtaatgcttggctgcatcgccatgatctcactactcgtcggctgctggcaaatgatcatcactatggtcccaaagtctggcgagagcttccaccgcaagctgctgaccactgtcctcgccgccccgatgttgttcttctcgagtaccgacagcgggtcaatccttaacaggttcagtcaagacttacaacttatcgatatggagcttcctgtcgctgcgatcaatactgttgctacgttcttcctttgcctggcacagatggctcttattggagtctcctccaaatacgcagccatctccttcccgatcgtgcttggtatcttgttcttcattcagaaggtgtacctgcgcacctcgcgccagcttcgttacttggatatcgaggccaaggctccgctgtactcgcacttcaccgactgtcttcaaggacttgtgactctacgtgccttcggatgggaacatgacatggagaagaagaatatcgctctcctggatcactcccaaaagcccttttacttcatgttcgctattcagcgctggctcactctgtcgctggacatggttgtggcgggaattgctgttcttctgatcgtgctggtcgtcgctctgcgtggatcaactcttagtgccggctacgttggtgtcgcgctgctgaacgttatccagttcagtcagagcatcaagcttctggttaccttctggaccaacttggagacgcatatcggttccatccagcgtatcaaagactttacgtcaaccgtcgagtcggaagacaggcctggtgaagaccaggatgtgccccctaactggccctcgaagggtgcagtcgccttccactctgtctctgcggcttacagaccctccgaaccagttctcaacgatgtttctcttactatccaggccggcgagaaagtcggcatttgcggacgcactggaaggtaagaaacaatctctaattcaatatcctaattcttgctaacaaaacaacagtggaaaaacctccatgatcatgagcatcttccgcatgatggaattaactagcggcactatcaccatcgatggagttgacatcagtcgactcccccgacgagcgatccggtcactgatcaacggcgtctcacaagattcccttctcttccaaggcagcgtccgattgaacgccgatccgaccggcgaccacaccgaccgagagatcttggcagccctcaagagcgtccagctcctccctgcgatccaagaaaaggggactcttgacacagacattgacgagatccacctgtctcacggccaaaagcagctcttctgccttgcccgcgccctccttcgcccaggcaacatcctcattttggatgaagccactagcaagtaagtcactcccctcacttcaagccacgtctccacttgacaaatatcgtttcaaatcccctgcatgagattccatccgggcgcgattaatttccttcgcgttttgtgatccgtgcgattcagccacacaccgatagaaccaccccttgctgcaagaaccaagactaacccactttctgcaacagcatcgacaccaaaacagatgaaattatgcagcgtgttattagagagaaattctgcaaccacaccatcatcgcggtcgcccacaagcttgacacaatcctcgacttcgatcgcatcgtcgtcttggaggctggtcgcatcattgagaacggggaaccgcatatgctgctggccgacgccaagtcgcacttcagcaacctctatatgagtgtcatggcgaccgaggaatcagattaattcctcttttggtttttggtttttgattttcggtttttaaaaattgggttaggttgtttgattgatttggcacctatacaggttgacgcgtcttctttcttctggcgtgacaatcttccacattccctttttcgaggtacatatcgacgacaacatattgatcttttggacattttcggagttatatattggttttcttgctggaccatgttcttgttacttttttgttctgctatgattattatttactctctttcattaccttataaccatggagtgatacttacacataactcccttattggacacttgattcttgatcttaataatctctaatattaattcaataccaattatggctttggctccttatcatatttcttatccagtaaatcaaaagcattattgcattagttttcttcatctgtgatattctatgtctatggtcgacgagcgggactttacagctcgacatacttcttcagtatgatccaagaagaatagacatacatatagtaaaactgggtatactgtcgtttatttcctttcccttcctatctgtagaaatattggacttgaccattttaaagttgcttgatatatatatcgcaggacttccatccatttccaaggggtacccaattgcgccaggaaacattgcactgaatcacatttgctaatgcagtcatgtatatctgcttttcaggttatgagcgcattgctcatttaactgtatttcatcaacgcctcgagtcctccactggatctccccggacttccattgctgtcacattcgcgccccaccaagatctaccaatcgcagagctttacctgccctctgcgaagtccaagtccatctacatccatactccgtactctcaccatccatcgctttatcaaatggagccccctataaatcttgaagaggtgcttgttgtgaccctccacacaccatttgggtgattcaccctgtttgcatcatcgaagcacattttcccgttaaatgaagctactatcagtatgtttgaaaacccaccaagtctactctttgcatataccgattaattcatgttagacaagagatttcaactcaaggcaccgcatgcccggagtcatcggagtcgctaataatccaaatgctaccctctaacctccgcccaactgtttttatatgttcgagaacgaggtcgaacgcccacaactggaggatttccgactcgccggatcacggaaccgactcccgacaccatcgataatagcaagtacgatcttttacgccccggagttatgtatgtcaagctctggaacacgttctaccaccgactatcaatatctcactactacacctctggagtacttgttggagactctaactccggcgagcgatatcgcgatcgtgagatcgcataacaatgtagccttggaaaaagatctaccttactccgtacaagatttcgtctccatcgataaacttacagattgccccttttccggctactgtggtacatatgtacatgtgggcctcgtggccggatgcgcgttcctagcgatgatcctggtcaccgtgaatgggtcaaaacttgctggtgctaaatgggtcagaggagatccactgataatccccgagatggtatttgcggatccgcgatctgcaatgaggatggaaatgtcttccgatatgcaccgacatcagatcaattcctaaattggcgtctcttcgctagacctgagtgtctcattgggcgcggttttaacgttgcagaatagtttaactttcgctttgctgtcatttggctaaatgcacttacctgcatatatgtactcgtagacctacggagtaattacattctatctatgaagagttgtataaatatgctcattatgtctcagtcagtatatccgtactccgtactccgtaccttggtcagattcggaatccacctgcccaagaaggcgatgattggcctatcctaattaggtatcctcatccctggtggatacaaggacaccccttctattgtcggtgcaccagccgtggctgttgatgggacctgttttcttcctgcccaggtgtgcgccttctccacctttcgttacccaagaatcctggaatattccattcatgggaactgtcgatcaccatttcttccctcgtgggacttctaatgcccatcaaaactactccgtacggaggaatataatacagtgacgcagcaaaagttttaagcacccattctactactacgtaccgccttcctaataaaacataccgccttctgaatttgtaataccgctcgttcccctcattatttgaccggcagaattgggtgctgagaattttgctttgacactgtacagagtagccttggtagccattatggtggagccaaacatgtcctcttatagtggtatttgaaagaaaagcaaatcctattttgcaccccatccgattatggactaccctaatagcaaagaaataaaaacacccatgtaccatacattgaaacaaaagaagaatcaaattcgacggccatggcaatccccaaggccaaaatgcaaagggtcatagataagtgccctgcgaaggtaccaattatagaaccatcgtttcatcattatccacatctttctcttcatcaagaccaaattcccagtctccacgctcaattcggctgacacggtcgagctcagactggaattcgcgacgcaggtgctcaagtgtcacgattatacgacgtttaagcaagtggttggttgcagggacttcgaaggacccaatgctgttacgccgttcgatggtggaagttttgctgcttcctgtgcggtggtcgggtgcaaaagcgacggctgtggatgttaggcgattgcgtccgagtggtgtaggggaggcggggtctacgtcctccatggagacgttcccttcttcatcgacttgtgttcctaagtgtctttcgtgaggaggaatcggggccgcgctgattggaggtccgttctcgacgaggatataagcttcgcttttgtcgacacaagcgaggaggttgattagagacaacagctcatggcggatttccttgctttcagcatcgtcttcctcaactggcgaccgggctgcatcctccgcttccctgcttttaagaatgagggctgatgacggagcatctcgtgctttgcggaggcgctggacgttgcggtaggcgatttcagcggctccgcggtagtcactgcgggcaatgcgataggcctggagaattcgggtgtagtcgggggtagctgggaaatttttgctgtccgcatccagccaggatacattggtggtttgtttgcgggtcaggtgaacgaggatctcgtcaatgaaagatgcgatgttgggcacgagcgaggtggggaaacggagaatctgcttaagaccagcagtgccaggtccagagactgccaggatggtggagatgagttcggtaagttcggttctttgtaatttgagatcctgcaacctagccagagcggaatatgcctggtcaaactggcaagtcttaagggctccagtaaacagacgagacagcagatcgtcgcgtacggtcgggtattcagagtcttgctcggcccagatttcagagtcgagggcctgcagcgccaggctggcaaagtccgcgacatgagagtaggagcgcactttttcataaatggagaggatgtgctggtaatatttcgcaagaccgttgtggaagcagtcaacatcgaggaggtctaaaagctctgctgacatgtcggaaagattgcccatcggcttgccgcaagctgcatttaggttagctgagttatatcaacatgagaaatcaccaggagatacgtacagagtagataggctgccttccggaaatatattgctgccgtatcgaattccgacatggccacatgcaatcgacccttgacatacgttgaccaggcagtacttccctggaaacgaaggaagtcccatgcaagatcgatgttgttcttggcgatcaggtcacactggatgtgagcgactgcgcttggatagttcacttcgccttcgcgggtaatccaggccacgacatctctgattcccaaagtcaatgtatagctttgtggagagtcaatcgcttgctggggcttgatatcggtaacaaacagatcctccaggatgctcgtagttcgttcactgttagtcttcgagctgtctttcagtgaaaatctctgtgttgaatcgacgtggggcttgcttgccctgtcgggacattggcggacattagagctgagccaggacatcatctcatattcacgtaggagatcaacaagcattgagaaaaggtcggacgcatcgaagttggacttgcttgtttgctcccattcgccatccacgaacgtgacgaggattagtagatcaaaaaagatttgacgagatatagagattgtctcctgcgcaccactgacgagaactcgagcgccaaaccatgttgaagagagttccgagtcttctccacagaagtgaagggaggcggtatggataatggcaaggaacgcctccatggacaagcaatcggtcctcatgtattcactaagggctgcatccagagtgtcaaaggctttgttggaaatttgattggcaaagtcacagcgctctcggaagttctccatgcggtccatgatcgacgaagaaggctcagaaaagatctcggcctggagagcggctcggcacgccccgtcaagctctggggagaatcttttgcggaaatcggatgccaccttcaacaatccagaggctgtttcgaaattcgggcccagctctctggaaacattgcgatgcctccagcgatctaccatcttcggcactccatcactgagctcggagctggaattgtgcaagaacaattcagtgatgctgcattcccgcactacagcgcaagagtctgacaggaggagccacggcatatcggtgtatgagtcgtacgcgagagaaattggttcgaaccgccgcttgttaaggtcttccgcaacttgccagaactgacgccactttgaatctgtatctgaaagataccgggggtagtccatctcatcgtccgcaaatttccgaagggagactgccgctgctattgtggagcagagtcgttcctctaaaggcagactctttttcagccctccagatgaagtcgacgagagtggcttgagagcctcctgataaacagccagagcggtctcaaggacttcaggcagatacctattcggttgcaggagatactgtagccacttctccgttggatccaccacatcatccacgaccagaggtggtggcaattcttgtcgatgggtttcgaatgttgtcgaaacccagttagaggcccagtccgcgactagggtttggaggttgaaatggagggtgtagagttggtaaagaccgtggtttctccagagcacccacagctccattcccttgccttcttcccgggatttgacctggaaatcagcgatgctccagaacatgttccctgtggcatccggatccacaggtcggaaaatatcgtctgcgaagagttcctcaatgatcagttcggatgtcagcccacccttgacagcccagaacttgaactttccgtcctcaaatggcgaatatgtgacgacatagaagcgatgtccaccatgcatagctcgctcggcgttgaagacgcgcatgaatgatgtctcggcggggttcagcgtgtacggtgcaagatctggatcatgaagcgagcgtcccaggagatcttttgtggccgccagcttgttcgttgctagattccaaatcttaagagtgtgattcagacagatcgcgaagacgtatgtctcgtcggaggtagtggcaatggcatttgcgacatgcaaatcgaggttgcgtccgtcgtgtttgatcgaggagggtgcattccatttgacgaggcctcgaatcgaagagccccatgttcgttcgtcgaaagtgagaggagaccaataggaacctagtttgagagacagtcaattaaacaggtgttgtaaaggtaacaagaacgagaagaaccactcaccatcgtcgccagctctccgggtcagccgtagaagcgcgccgttatcgagagagatgaacaactctaggggactgctcgcgtgtagtcggtgggggttcgaaaaggccaacggagcggggaggaacgtcttgcaccaatccctcacattttcatcgattgaagaggtccgtcggaaaaattcagggcgtagagacagggtgtgaaggtgcttagaagcggtgatcacaaagacactgatgagttcgtgatcctcggagtcggacatttcaactccgaaggggagaatctcctcctggaaatccagtcgcagggtcacattgtattcgtaaacctccattccacctttagtcaggtccgcgcactgaatctccagcactttgttgtcgttgatgacccgccacaagaatgtcctcggatagaccctgcgcttccgaaagtagacctcaccctgtgtcgcgaggtgacgtctggcaaattcatcttcatctttggcgattgggagttcctggtcggtggatgagatcgaaaagcgtggacgacggatcgcgacctcttgagtcggaatctggatgttggcgaccgtggtcggcgagtagggccgaaggtcgacccttgagtctttgtaaattttcgccatgatcgaattgacgtgtgtcaacttagcactccatggccggggaagtaaaggttggaagatcgaagggcgggaagctggagctctcaaaaaacatgggaagtcttggcgcgataaaaggcctgagattgatggcttccgccctttgaggtttactcagaccacttacactctattttactctatgttatcttctaggtgaattgcctctcttcaaaagttaagaataaacagaaattgtgatttctaattgctatcaaaaaaaaagatcccccaacgctgagatgagatgccacgggtcgctctaaccacataaacagctattgaatataagctcatcaagtcaataatatcgtgtcgcagaacaagacaggcacaaccttgagaaatgtcgactcatttatcttccaagtccttctcactaggatcaccgataccattatcattgatagcgaaaaggcaatcactctctggaagacaaggactatcataaatcttgcaaattcgagtctcgccacggcccttcttcagactgagtcgagtggtactggcgtgggcgatgatattaccaccaataggtttcttgggatccgggttaaacatagcactggggccaccatcgacttgggcaacgacctggtttgtgatcacgactgcaatgccaaattcatctgcaaggcgttgcaaggtacgcatgaacttagccaaatgactctgccgtgaggcgagctcaccacgaccgttaaaatccgttcggtacagagatgtcgcggagtcaaccaccagaagagagaatcgcgtctcgcacatcatctgtgaggcctggttgagcaacgagagctggtggtctgagttgtatgctcgtgcatatgccacattatcaaggacctcgtcaccgacgagaccgtatcgctctgcaaccgcaaggcatcgcactggacggaaagtaccctctgtatcgatataaagacacttgccctcgccgccacccatatcaaatggaagttggcaggtcaccgcgagagtgtgacaaatctgactctttcccgttctgaactccccgaaaatctcagtgatcgaccccgtttcaaacccacctccgagcaatgtgtcgagtctcttggatcctgttgtgatagagatgagctcgctcctccgggcatgcatttcagttgccgtggtgaatcccatagggaccagtttcgaggctaatcagcgcgtttcaattagcgaacccatcttcaatgtagaacttatctgtcgcagaagaggggtttaccttctactaggatcttagtggccttttgttccgagatacccttaatctgttccaacaaccgtttgggcctaaaagtcacagtagtgttaaccaaattgagatgagcagggcaatcggtatagcagagctgccgccggggggaaaaagccgcaagaatgaagatcatggatactcacgtgtaggcgatggactcaacagtgttatatcctgcatccaggaacaacttaatatccctagcggtcaagcccgaaacaccctatcagaaccaatttaatttagtataaaggtccaacattcttcggcgaaagaatatcgccgtgggattcactcacgtcgagcgcggaaagcggagtgggggctccagggccaggaagtccactatcctcgagttgctcttctccctccatagtagcagtagtactcgtttctcggtgttatgaggatcttgatgccttttggcggggtcactcgattcgaaagcacaggtgatgacgcgtttggggtttgggtgagatgagtactcgctcttctcgattttgaatattaaacaaagccacgggttttaaatgatcaattagcaagcagaaaatctctgtaaagtctgaaaggtctaaagcgtctgtttgtggcaaaaaatctccggatgactctgagaaacaaatcggacgcgtcaaatggatcgcgagatcacgtgcagtgctgccttgagcctttccggtttggcataacgaactatatctcttccaatttatgaatacaacatatgtgtgaagcgcatgtattactttgtttctctagtactaccttacgattaaattaccagcaatggttttcattggggcggatcaattactgtattcccagtgggtcggatgctaatggttcaatattcaataacaaaaggtgtaagaatacaaatcctgcaatggcctgcatgctaagacgccgtctgtccattgaatgatattcactcaatgttctttgagtcatggaaacccaagtgctgaaaaactgcccatgaactgccgcaacgccatatcaaaatcaatgctaaatgtccgagcaaaagcaggtgttgaaggtcttcgaggtgtttgttgcattcgttttccttgcgagacaatgattttttcgtgtactgtatctccctactgttgattctcaggagaattgagccacggacggaaaggacgaagcaacgacttccggaaccgtctctgatactgacgcagagccggattaaactccagctgctcggctggcagtccgatttggatattttcgttgaagatctggcttatcctgcgtcggaactcttctgatgatcgccggcgaagacggtctatgaatgaggcgcattagtttctgtgttcaattcctaaatcgtggcaaattaaacttactcatggttcgtgagccccgcttgctctctggtgaaggaccagatggtgactcaccgatggctgggacatatttcatgccgtcatcaacgccgtccaatcctactcgataatccttcgtgtcgggattagaggttgtaccgaatattcgcgtgtgaaagctagcacgcttttccctaactgttgtgtccttcatgccgatcattgactcctctcgcgcaggtgacatgcgcatggaatctaggttgagcagactagatcggccataaagtgcgctgggtctttggttctcgtaggtgaagcctgcggaggctgggttgagctcgggaacgacttcacgtcgggcagccagtggcatgggctttgggttgatcaaggaactgtgagattccaccgaggagctgggggtgtcaatggttctatacagcgaccttggcactggactggccggtcgacttggaactggactttgcgtgggtgtgttgggatctgagacccagatcccttccactcctattcctctttccaaagctctggcaccgaaagggatgtcatccttgtgcagcattgggtacacctcagcttcctcctctcgttcttttgcctctgtcgcagtgtgtttgctcatcgtccagcgattccagccgaggacgcaaaaggcgtaaaggagcactaggatctgcgaagcttgtcagttggcgtctttgtggcattatcatggagtcacgtacgatcagcgtagctagtacctgtcaacgacaatggtcagcaggggacctccgtggtcatgagtgtatacttatacttaccacagtcagcttctcccatagctcccaatctacccagaacgtcatagtggccggttactttgaactgtattcgggctttaccgtgaagaacatccgagtaagaatgtgcagactttcttttggggcacagatgaaagagatttacggataaaaagatactggagagggattccgaggtcttaggttcgagcaaaggtgatctctttccgggaacagggaaagggcagtggtggcaggagcgcctgcttaaagcatgtccgtatagttctgggttttctttcctttttgttttttccttttcatattcatggtctctagtacgtaggccataagcatgcgggcatttatgatttacatacttcattgactgtggatacacagtgtccagttttgaattgcagctatgaacagctactgagacggccattcaagagagggacaaaaaaattagctcctaatgttgattgccatataaaaaaaagaaaatacagaaaaaaaaaaaagaaatctctccctcggggaatcgaaccccggtctcccgcgcttatcggttttaatgacaagcggaaatcatcaccactagaccaaggaagaatgcgatggccgagttactgctcggccacttggctggttgatagggaggttagccatctttgttattataagccagacttttaccgaacatcttcaatccacaacatatgcaaaaggtacacacgtacgacatcttggtcgctaaactctcaaattaactacaaaaaatattgaagagtctgccttcttgatcttataaatgagaaataacaaaaagtcttcattggtcatacgaggacattatgaaagctacttttcgcctttatttcctcattcttttcaaggtttcttggctcttctctacttctagttattataaccttgtgttggcactagatgtgtcaggaagagtgaaattaattgactcagacgcacttgattatatatctctctctcaaaactcagttaaccaccaaaacagaaaaagtcactaaatgctacctgatatgtactcgaaacacttcaacgagccccaggcttggcgtttcctgggagacaagtatccagtcttgtcatcctgacagcccttaaaagccgcataggtctctcctatccagtcctcatccacacatttcgaacccgaatacatataacacttgccacgtgtgagatacaatgacttaggctttgtcactttactggaagcacaggtgccccagttgagaccaccgttagtccaccatcgacaggacgtggttgtattcgatattgtggtgtcggtattgtcagcgagaatgatacaattctcagtatcttgagtttcgtgtccttgaagagagaagtaatcgcctgtacaaccagcaccttcgtatattgtcatttgccaagtcgcagacggagcgacactgctcgtggtttttgttaccacttctatgctagtcatggttaccatgttcaccttctcagtagtagtctttgaagtagtcgatttggaagtagtggtagatttggaagtagtggtagatttggaagtagtggtcgatttggaagtagtggtagatttagaagtagtgggcttggtagtggttttcgtagtagaagtctttaaagtagtcgccttcgaagtagcacttttggttgtgacttccttttgggtactcttcggtccacaattgaacaagcaaccgctgctagcatcgcaataatccgagctagtgccacactgaccaaacttagaacactggagatataattagtagagtcagcaagatgggcaattccgacaataaacccacacattgattcgaagagcactggtttagagaggcgagatcggcatagttggcagggcgtcttgtcccgggaacctgaggaccgcagacagcatgcgggagagcaaccggcataggaagggcaccggagctgagacaaacaaaactgccttgcttcacattgccacaacctgtccagtcccaggctccgacattccaagtttcgatattgctggtagtgagctggtagcgcttagcaagagctgcgcaggtatcaccctgctgaatggtataggtatagcagataccatcgctgccaggcgcaaatgaactgcgtttattgagtgaatggccatgagagtcgccagagccatgcccggattgggcagttgctatgtggacagacacaagagagaggaggatatgaatgaaatacatcactttgaagatacccttgaacgtatttctggaaggatcaatcagtcctttataaacagttgaatatgagaaaaataattcttcgagattagctagtctgatcaaggtgaccatcggatatcgaggtcagttcattgttcaactgcagaccccaggaaccatacaaggttctgcctatcgcatcgagtgatgggtgagtttaaacaattaattaacaaagaagttgccacaacccacgtattaacctcttcggcttaccctttctttccctacacacgatatccgagggctaggatcaatacatgatttccaagcaaacacaatacggggaagcttacacatacaaggccaaatgcatcagaatacaggcatagcaagagcggataacaggaaaaaaacaacgtaagacttggccaaaaaagaaaaaggaaattagaaaaccctagatcctggagagatctgaaagaaaaccgagaggaaacggagggaaagttggcaacaaagaggctatttagcaataaatagcattggtggtgcccatgtatctggcagactattgagacttcatcccaaaacagtgctcaatagtgctaatggagtcacatcctgacaccagaggcaaaaaacctctttcaagttccgagtcatgcgagagtccacggggagacttccttttgtgtcatatttatccaggtagagttgaataacagtttccttggaccgacaaccttctcaatagctacttcgcatgcttgatggttattggggtgagccaagagaagttgaaaggaaagcagccagagagagataaaagagaatactgatgacagttgccagtaggtaccggggacaagctggccataggacaaatgtgacatctatgctagcaagggtccaaagtggacgcatgaccttcattcggcaagtcgcggcaagtctatgcatttgataagacttaaaaatccaggctattaactcctcgggattggtgagaattatacttcaaagttcaagtactgtggcttgaagacccgggatttgagtcaattgtgccgcactcttctgatttattactaggaagaaggaattgcggcatcacggtccaatgacccgacgcttagatccggacattatcatcgaatgaggttagcgccgactagctcttctgcacgcagtccgaaatctgcacgcggggactccgatgcaggggtattgtctcttctcatccggcggggaattcactcggagaattatggctacgaggtcttctttctggtgtcttctttcaatatgccaccacacaaccaggcacacattatgactttacactgctagtatacataccatctaggtatggggatagtatccacattattcacaattcccgtttacccacccctcccgcatcctctcctgggcatcattgcttgttgaaagcttggcactcttatcactcacaggctaatggctagaaaacaagcctatatattagctttcaagccacagtcacattaagtggctgttacttactgacaattcctgccggtgcgctctgaagagagcgatcacttccatattagttcggctttctcattctacgatacttgttaatctttatcaacatctccagccgtcggacatccggagacccggagcgctggagattgtatccttttagcacactcgagaaatagacaatgccattggactcagaccctagtctttgctgagtatgtgtgtggatgcaatgcatgaaataggtccgagcaatcgaggcatctgggtacttgtgacccgagcttgcgagcagttgcgccgataaagtgatatcttcagaaaacggtccttcctgggtttatgcatcggtctccgacggcatcagaagagatgagggggtgttacattcagagagaagtgttcaatgtgcattagctcgagtacttcggcattattatcttctattcttccgtgaagctatctgtggacaactagccacgatggctatataaacgcgcatttcccatgggagttatctcgttattcacacagtcaagctacctccagttctttcaatcaaacagttcaatcatccaatctgcactatgaagttctcggctaccatcctcagcgcagcgttgctcacagcctcagctattgctgctcctctcaccgaacgccgcgcagctcgcaatgtcgccagagctgagggccgcgctaaccgaatcacccgtccgccttacaagcctgacaccagggagcttcttagtctgaacaagacaagccacgaggagtacagctccaactgggccggtgccgtgctcattggcaccggatatacctctgtcaccggacaattcaccgtccccacgcccaaactaccctcaggtgcttcctctaccacccagtactgtgcctctgcttgggtcggtattgacggtgatacttgcagcaccgccatcctccagaccggagttgatttctgcatccaaggaagcaaggttacctacgatgcctggtacgagtggtacccggattacgcctacgacttctccggcatcccgatctccgcgggagatgtgattaaggtcactgtgaccgctacctccaagacggccggttctgccgtgatcaacaacctgactactggcaaatctgttacccacactttcaccggtggtgttgatggaagcctgtgcgagtacaatgctgaatggatcgtcgaggactttgaaagcggcggctcgctggttcccttcagcaactttggaactgtgactttctcaaacgcccaggccaagtctggtagcacgactgtcggcccgtctggctctactctcattgatatcaagcaaagctcgcaagtcttgacctcctcttccgttactagcaacagtgttactgtgagctatgtttaaggtgaaggtcacgaatattggaaacgtaatagtgcactagtaggcgaaggagagtcgggaggttggggggccgcaaagaaaacagggtttggcaagcaatgggagatactgtgttatcatttgtggtaaatacattagaagccaatcgaaactcattttgccttgattgatacatagagtggggagttatttggcataatctagtggccattgtgtgcactcctcgaaaatcaatattgtagatacagtttagctataccgatgtcctccgaaatattataaaccaaatgaaggtggtgatcatctagatctcgtgtaaatatcgcaatcataccacgtctacatatttgacaatttcagcttaagcattcaggttgagcggcgagacacaagagaacgagttaagctgcgggagctggaaggcatcaaccattcctaggagagaaattagtatggagtaaataacaagaaagcataataactcaccaacaatagccgcccacatgcccagtccacacatcgagagtgatgctaagcagaacacaatatgccaaacgttggtggcgacttggaaggtgccgccagaaaagaaaccgcggacccatcttgccgttgttgattcggtccggatcacctctccggttgtcgggttgaatccttcaccaatctccggtcgaatagcattcttctggatgtcaaatgcaagggcaaacaagggaggtatggtaaatgtcaagttcaaaagcatggaagcggaaatgatgctgacgaagccaaagtaatctggaacggctgcggcaatgataaaggcgatcgtccaccaaattgggacgagagaagcatagacaattttgccaacccgggtattcagaggaggcataccgaaaatatccatcaagacgttattgtagacgatcttgactccaatatttccgtagaggcctgcgcagatcagagcagagagcaaagaaaccatgttgccgacggtttgccacgagtagacgctgataccctggtaactcggactgaagctgtactgtccttggagatgatagacgacgcatccgtgagtgagatagacgctgtagatgaaaaactgggctccccacatagctttgaggaagtctcgaggccgccgcatttcggccatgaattcgacaaacagctgtgcacctgcatatgccagcacaccggaaagcatgccattcaccgacccaatgagtccatccgtggggatattgttgtaatgcatgatcggcgggtagttaccctcactatccggtgtgatcgttgctctgtcaaccgcactgccagctgacccgagcgtggaaattttgtagttcggtggagacatcgacatcacacccatagtcatgaagatgacaaacaaattcatccacactgcgagatttgcaatccagccatacgctttgagagtcctgatctgagaaacaaagaagccgacacaagcaaagatgacgggacagacaacatagcagagtcggaactgtgatacttgagagatgttttcgccaaatccgatcgtgacttggcccacaagcaagagtagcgagatcgcctgagagacatttgtaagatggcgaccgtaccgaccaagcgtccggaatccgagatcaccatagttcttggccgggaactcgtagctgtccacgccgaggaagacacgccaaaggagatatccagagtatccggccatgaatccgaaaacggtgtagaaggcaatgcctatatcccaatcagtcaactcagtgttccagatgtgtacaggaataaatactaacctggtccccaacccaacgtgcccattgcaaagcccgcgccatacgggccgagaatatccgttgtgatcaaatagaaacctagcagtcttgtaagtatggagttcaaaagatacaattgccgacttacaggcaccccatgaggcagacctaagcgaacggcttgcatttgtccattcctcgtctgtgattgcaagtctccgctcgcgagttgaaaagtctttctctgtcagtgttgtaattggcccttcttcggtctttttgcctgagagaagctgtcggatattgagcaccggaggctccaaaagctcttcctcttctcttgtcttcttcgaatagtaatggtactcctcgaatgtgatatttggatcgtaagcgtcgcgagcctgtggtttgatgagggttgttgaagtcaactctccaggcgaagtcaactcccgaggcgattctggcatgaaaccgccctctttctcgtccaaagagagttccatattcatcgacagtgagtgtagaataggcttcaaatgagaatgtatagtgtgagacagatgcgaacattcattgtccaagtgggtaaagttgatcccttttaatgtcatataaaccaagcgcgggggataagcagataagcatctgtccaaagttaattaattaattccgaggtatacaagcattaattcggagtgttgtcggagagagagcccaagtctcctatcgcgggactgcgactaccagttggacgcattaatctaccgataaatccaaatgaatgcaacgataaaccagccattgataacggtctttgataatccttgcctgattgagggtcactctggagaaagggccattgagcgagagctaacggggaggaaagataagtttcgatggaacctcaggcccacaggtgagtgcttgattggtgtctggggtatccggagtgcagccctaattcctcagatctcatgatgggcactgctgtacggagtgcaggagggctagttacattcatagatgctaacctctccccttccccctcacattgagcgaatactcggttctccttgatagatgcttattgctggaatggtcaaacatgtaatgactaatacaaaatagtcacgggacagcgtagcacgggacgcacagtcacgtggatatcgggggaaaatacttccgtcccggtattaacaatgccaatcttatccaccaatacgcagtaaccggccagtatatttttacgggctatttttcacaccctatggtcgtatatatcagataatttgtgggatagaaacatctcgtagaaatacagattcaaatgatggcaagaagggtatgcgcaatgttataggcgacaaaatcaagatgtcctgatgcaatcagacacagaagagcccaaaaagaaaaaaagaaaaaaaaagcaagaaaaaaaatcaccagcatctggctaaagagactttccgtacttctcatacttctcatacaagtgcagtatcgctattctcctctgtatagaggcaatcggggaaattcgccctgtagcaattttagcgcgtgaatcactaattggtgaagtgttgacataccagaaatcaccatcgaatgcacaatagtcaggcaccatccagtcagcggtgggcatctcggcattgagctgtgtaggtgatgtttccattccaagtggatttaccggttgtaatagcatatccacaacagactggagagagcgcttggcctgggaaaacaatttgaaattaccgtcactggggctatgcaaaatatccatgtgtacaatcagaacagacagattctcgattacccgtcgtcgagacggcgggtctaattccttgaaccgacatcgagatgatggctgtagaagatatagtgcaagggccccggcggcagggagagcgcaggatgccacctatatataaagtcagcccaacataatttaacaagtttctcagggtacgtactctccaggctagagatataaagccaaggttcggtagctgttcccgtcggaccaaggcatcattaaccgaggaaattagttccattgcggagcgaaataaacttgagtgttcgagtccatgccgccatgctgcccattcgatcaaaaatgaagactgtagatataaaatccgagtcatatgtaagcactccatttccatgcgcggtctttggatatcccagagttcgtgagatggcaccctcagaaaggacggtaggttctcccatgccttgttgagttcatggtgcaagtcactgtgaacgatcagctaatgtgttgcacgaactgagacgagtcacgtacattattcgccgttgcatatcatatatattcctgcccagaagcaattccaacgtctcttctcgaatcattgctgtaatcgttgaccatcgcataacagcactcggtcggatgtgaccctgcgaattccagccggcgtgatcaatatcttccagctctctactgagagcagtctccgacagggaataacacttctcgtcaatatcaaggggcaagttgatacagcaaaatttcttgctcatgcgcggtggtcgcccgagaaatgttgctaggctgatatcgatactgtataagcgggaaaaaatacgttttcttagttcaaccagaaagaagggaacatcgcgcgcttcttggatgctctcgtggagtccagcggcaagtagagcacaggctgcgtcgttgagccggcgccacgttttaagacctgcccatctgtcactttgagtcacacgcgaaaggagattaagagtttgtagcgtactttgatcaccataaaaaacagactgcacctggaacgtctgatacagaaagagaatatgaacgtcattgagaacctccaatgcctcgcaaaagattgcgcatttatttccaaattgaatgaggttcattcttaaggtctgccgttctggttctgtccggtacagagcatatggtgcacgaaactcagttgcggcaatactatgtcccttgttagtccccttatctctagaacagtagtttccgggattttcccctacccaacaagtgtaaggattgctcccattgtctcccagcggagattcggacccgtatactggtcgatgaggccttgcagcgtcatcaaacgatgtatttccacagggcggctgctattttcaaacaaacgctgtgacaaagctaataaatcggatcggaaatttttagaatgctgtagggtgacaatttcctcaatgactgcatcggcgaatggctgaatgaggatcgcgccgacatgcgactcgagcccgttccccttccagtccgagaaaaagtgcataacggtgttatttatcttggagctggtcagtgtttctagcagctgtgcgccctcgacggtcgaagcgttgttcatgaaacgagtagagtaagctggcccctcatcatcccgcccgaccggaagcaaggtcgaggcagcttccagatccccaaacaacatggtttgctcgcgtacattgcctaacagtgagtctagagaagaagagccttgataccccgtattagggtgtgtatttggtggcagagttggctggatggcttctaggatggatgtagaattaaaagccagctgatgtctggaatgatcgtcaggacgcaatttataacatagaggccgattaaatgaatcacgcactgcattcccggagattggggtgtaaaggagggtcgactccgcttgaacgcattcttcctgtagacgcactcatgggggatatctcgcccgacacaccgagcgcaaggttggcgatgatcgcaggctagtttagagagtcgacagggttcacaggatgcgactctcggtggccgctgtgcccgcgtactctttgaacgaccagacatattcaccacacgcacacgtggaagactggaagatgggggcggcggacgagaagcgggggcgttccccttatcagctgagtcgatgtttttgttttctaagagtgaaaggagacaagatattcatttgttcaggattcgataatttcaagctatgatattttcttcaatgcaggcaatgggccatcccaagttggttgtgtcctcccctcccaataactctccaccggtcgtgagcctatctcactctgtatttgagccgacacaatctcattttgcccccaaacgcgcagaatatttaatcccactagttttcgcacctgctcgtcggttgcaccgcgtcgcatgacagcttcaatgagtctcgggtatgccgagacatcctcgatcccactggcaacagcaggtgtcccatcaaaatcgctgcctgggtcaatttagtatgtgttattccgacactcacagcgaaccactcaccaattccaacatggtcccagccggcgatggaggcagcatggaatatgtgatcgaccacgtcttccaaactggccttgtccgggttgtcaggtcgaatgaacttgttcgcaaaaaagatcatgattaggccaccattttggcggagcatccgaaggacgtcatcgggggtatttctcagacgctttgcgagcgcataacacgccgaatgggaaaatatcactggtgcccgagtcgcagctatagcatctcgcattgttcggtgagacgtgtgggagaggtctatcatcatccctaggcgattcatttcgcgtatcgcggcacgtccaaagtcactcagtccattatccttgcctgtttccgttactgtgctggccgcagtagcgaatgcattgtcacagttgtgggttagagtgatatagcgcaccccgagctcgtacatttgccggatcacggcaagggatgaaccgatctgatggagtccttcagcaccgagcatggaagatattctctttgatttgaaggcttgtcgagcacatgctgctgtgtcgcaatactgcagctcgctatattccgctatcaagcgctttgccacatcaatctgctcaagggtatcacgaacactatgctataaattggagttgtcaacatcgctcttgagcgggaaagggccagatttgcaattacatttggatcgtcaagatgaagtattcggggacactgggttcgatgtcagtcacatgtaatgctgcatgctcaatagtcagggacctcacctctacaaagaccgaccaaaactgcccacccactttgccctgcttcatccgcttaagatctgtatgagatgcaagtccttcatacagccaatattaattagtccttgatcaaacgattggcaaacgaatagaaactataccctgatcaaatggaaggttgtctccataaatctgattgttgagctgcagtcggacaaggaatggaagatcgttatgtccatctatgagaggtatttccgataataccctggtcgttcgagccgcaaagttcaatggatcgatatcttgaggctgcactaggtctcttgctcttatcgcaacccagagcgctatagagatggaaccaatcgcaacaagcttgagaggattccatgatttccctctttgtgcgttgaacacaattacccgactatgattctcattatcactcgtggtaccctcgcacaatgatgaccccgttggccattgtggctcaattgcatccaagcgattcatagaggcggaaaagggaaagagatggccgcgccaagggagattcaggtatcatccgtattgtttgataagagagaaagactaaatcattaatctgtcgaagcgatacatttgtcaaatgtccgagaggttccatgctgtcggacagagtcaggagcgttacaccggtgacacatatcttgctatcataaagattcgcacgattaccacgaggcaaatgcggatgcaacgcagacagataatccaatggacattctttgacttatttgaccaattggcttgctttctcgttattgctgagggaaatcccgcgtgaggggcattcggagagagcacggagagagcaacaacattctccgagcggggccgccagagacgtttggcgttgcgacgttcactatcaagcaaaccccatatttaccgattaaagttcagggccatgcataaaactgacgatgtagcgcgctcgagatcgaatcatgcacacggtcagacctcaaaaacatcatgatttcacttcttgcaaaacaagtcaccctggcactggtctggggtgctgccaacgcccttccaagctccaatgcaagccctattctcgacacccgctccgtgcagcctgcctacgtaagtgtggcagtgacaacattgtggaccgaccccagcaagccgcgcgcaatcgatgagccggcactgacaaacccggtgcaaatggacaaatggctttctatgaacgtgtccgactacagcgacctcaccactaatagccggactcagacgcaagcgctttttggtgcacgagtggacatcatcggccatgagaatggttggtacgaggtggccctccccggacaggcgaccccaaagaacgccctgggatatcccggctgggtccctgctgcgcaggtatcgtttgaccaggaatacggacgactgctctcagaaaagcccttcgcgaaagtcgaaaaggctgccacggttccgctctaccgcgatcatagcctgaagtcgaagctaatggaagtcacctacgacacaagactccccgtcctgcgggagacaaaatcagccattgaagtcgcaactcccggtggtggctcggcttacttgtccacccatgatgcttccgtctacaagtctgcctcggatattccttatccgacgagccttgacctgatcaacacagcgaaactgttccttggccttccttatctctggggcggtatgtcaggatacgccgtcgactgctcgggattcacgcacaccctctaccattcgcatggcattgatattgctcgtgacgctgacgctcaagccgacttcactggtcatggcacccctgtcgcgcaggcggatttgcaacccgcggatctcatgttctacgcgagcaacctcagtgatgcaagcacgatttatcacgttgcgatgtatatcggaaatggagaaatggtcgaggcatatgattctggcactccagtgagaatcacgcctgctcgcttcaccgacgagtactggggagcagagcggttcttgaagcaccgaaagatctgaaaagtttttacagattttgcaaatgcttgcagagtgtttattttatgcatcagatgtaattggttaccaagcattcattgttatagatatgttatgtactttttgatatcgagtgtttcaataagaattcgaatttgtatatattgaacttggatagttgcgagaaagtgtatgaatgtagccagccatgaaaaattcgagactaaagggatgtcagaaaagcttccttatatgaatattctaaagtagcgcaatccccggagccatcaacgggtgaaagatgagattatgtaattgagatgagtcacgccaaatatgatacaagaatggtgatacaagaatgtctaatgatgttcccccaagaaagaaaagatctatcgatggtgtacatatgcaaagtcgtgccgtaacctaagcgccagtgacccggagcacaaattcatatacgccaagcgtaatgatagctgagggtaaagaacggagcatgtgaggggccagacctccgtacaagcccgccataccttcttctttagcgatggtactgaagcattgtaccagccctgtgtatttggcctggccatgctccacaggtgcctggcgcaatcgtgttcggataacctaagaattgagttagtgtgaaactaggataattgccgcagaggggaatacgtacctcatgaggatatgtgatgagacctgccacgagcttagcggaagacgcggcaccactagtactaacccaatggaacacttcgttccagaagggagtccttggcccctcggtagcttctaatgaccgattgagcctagttttcaactgttcatagagcaccagatgtagagccgtttcaatcgagccgaggtagcttgcgctcaatcctctataaaagccacccagtccctcatttcgcatgacttgcctgatgcaatcaacgctattgcgatatcgacgagtcgaaggaccaccggtgtgtgtttgtgttttgtcaagttgtagccgtgttttgacaagccatattggattcgttgctgttgaggttgcgagtccggcgcagattgcagcttgggcatggacgatagcagagtcttccgtgtgtcccatgagttgagctccaacacgcttgcaattgccgtatacgtaaaatttgatggcggtcgccggtactacaccggccatgcttggcccgaggcctcgaaagaaggctcgccagccttcagcacgataaatggaattgataatccgtagcgttttatgacttgatcgttgtgaggtttgaggaagggaggcgtcggagcctttttgtggttgataaaagtcggactgaagacgagttcgtaagacatcaagaggcgaagtcactatcgcggtagccattccaccgctcctatgattatgttagaagaatcaacataataccagctggaaaatacatacgcgcccgcaagaaggtgcacccaagaactaacagccttcttggtcggcatctcaacagggataccctcttctcctccatctgaaggagcatactgagtttgagcatttccacccatatttgcgtcgtaccttgagaagagtgagatcgcgaagggcgagtcccgacactttttttcggcgatatgaatttccgtgatccacgtcgccagatcacgtgtatagtcatattatcacgtgcaccctctattactttaatccagtgcaatggaaatatctacatatgaggaaggctggaagacttaagtaattgaaacagccgattttcactgtagttatatatatatatgattggcacataaagtacggagtactctttgcacattatgattgttggccttggtgcctgaaccgccaggtcatctgaccgccctggcacggtatatatggcctacggtgcgttttctctctctgattcacaattctcatcgcactaaggccaatgtacataaaccagtgccaagatgattacctcatcagagcaaggtagacctcagaaaagaaggagaattgtcatttcctgtacagaatgtcatcggcgcaagcaaaaagtatggggcaacacgaaagcgcatgaacaaggaaaagaaagctactaaagattgaatagtgtgaccgccagtatccatgctgcaactgcagcaagcgaggaacgcaggtatttatatttataatagaggcaatactgcttttggtctgattggcgactgcaggatctttgccactatgacgctttaccaaagaactgccaacccacccagggcagttctggggtggatagccccttggaaatcactaccaacagcaaggccatgcatttttacccacctgctagaccgggctgcgagcgggctagcgagtctgaggacaagatcagaaattttggatattccagctacggcaatcacaactccatgagcttattacggaccgtagagctttatggaggccgggccaaaggcttactgagcccctttcctacaaaccagtcacctttatcaagcgaggcagatcgcaagtacagggaattagtccgtcagctgccctcgcagccctgcatcgagatcttggttcaaacgtttttctccgacatcaattggcagtatgacctactcgacgagaaatcctttagagaagacctagatgcgtggggaaagatctcatactctgaccttcaagcaggcttcgcaagattggcgctgggaaccattgtgtttccagcgttactatttcaagtcctcgcacaagcacttctttttcactcccctgatgatgacatgatcaattcgctcatcaccatggctgaaatgaccttccatgatcttggggccgaatatagtgatacgggtgttgagttactcgcggttctgggaaaagaggacatcacgatcgccacggtccaagcaggtatgctacgtgcctcgtttctgaaaagtagtggcaaagttgttgaatcctggcatgtacttgggacaacaatccgtgatgcacaggaaattggcctgcatactggacaaattatgtgtggacaatttccagttgggcccgggcgcgagagacaaaacatcagtctcgttggtcacagagtttgggtggtcttgcatatttgggacatccatatggctgttgttcttggtcgaccgattgctaccgatctacagatagatcgcttcgcttgcactatagaagaagacgaaacgcggcgagaactattctcgcattggcaaaccgagactaacccccctcgaccatttgacgtcatcctcgccggctttaatgtagcctatcgatatttcaaggacatccacaaattggaacatcacagtgctggcccgcaagattatcctacggtcgaacatattcacggtgcaatcaagagaaactcagaaatgttaccctcttggtgccgtcttgaacacccagatacaaagtttgatcggatacaagggtgtcaatggttacctcttgcccgggaaggactgtactcactcattcaccttgttcttctcgcacttcatcgaccatacatattctctgtggccaacagtcgcacggaagcgctcaaagctggagtatccattcttcgtgcacaggaacgactattccagcaatcccagccgcaccattgcaaggtgttcagtccggtctacgcttcttttgatgcaattgttctccttgcagcactctgtcttgtttttccgaacgagaatcaagaactacgagcagactgtatcgacgttgttgaaagagggatgcaaagactgggaatcattggtcaatttaattccatggcaaagtcagcacatggtgttgtctgcagcttgtaccgtcgcctaacgcatcggttaaacctccccggggacgttgagcgagctggagcattttccaacaacccagaatggatctctcccaacagcgatacatttatatataacgggacactgtcagaactctcttttgatgctgttttacctccgcgtccaacccatgacctgttcttcaaccatatttcaagtacacaaattcctgttatggcgacaccagaaagtttaccctttgacccgcttagtgtgagcattacagatagttggaattttgaaggcgtcttttcagatgccagcttttggagtcggatgaaccagcctaatcattgaaaatgtacctatcgccgattgcattctattcaactcccgcaaaccagaccgcattgtcccccacattgcgatcgacacaatccagctggccatagtactggaagtgggaacctcgttgtttcagatcaacttcttttgacttgtggggatggactcctacttgcgcttagcagcagccgcattcagacagttgtcaccgtggatgagcagcgccggcttgtccagcttcgccacgacaacaatgatggtctagctaaagggcttgctgagctttctcaggtcgcgcttgtgcagggcttctcactgttcgcgggtgggcattttcctctccgctatatcggtaccaggcgtccatgaaacacacccagcgcaaattatgtggatgtagatgtagatgtcggtttcatagtctcggtagtatccagagaccgaagccacgcccccggttatcgtaggatgccacatccatggactcggccatcttggcaaataccgactaggatgagccgggatgcaccaagatcgccgcgctccgatagatagtcaagtcctgcgaccatgtcctcgtcttttatgttgggattttcagtcgtcaagttcgatatctataaaccccctccaattgtttgcatggcaactatgacgcattagattaaatgaacattccaatcatatcaacgttgcgatctccattttagtactccttacattatcgccgataaaagcgggtcaggctggacccttaacgccgatgaaccaatcaaagaagaattgaactgtggggattatgcaacaatcgatctccgctggctaccggatttggcaatgtgcgatgtacatcatacagtgaagctgggcgcagatggaggggcaagacttatataaactcaaagctgtccgctcgctcacagaatttaatctcccactacctgacttccaatcaaacaagcaaaaatgacacccaaggtcctcgttgtcctcacctcctatggcaagttcgccgccacaggaggttcaaccggctggtttctggtatgcacctctgactgcggctgcaattgagaaacagccattccgttttagatgttcacaaatgctgacgatgttttccaaaggccgaattcgcccacccttatgaggtcctccgcaacaaggtctccgtaaccgtcgcttcgcctaagggtggagaagccccattggaccccgcctccgtgaagatggctgagtcggatgacgtgtcactggctttctttaaggaggagaaagccctgtggacgaacacgcataagttgtcggatatactcccgcgcgccagcgagttcgatgctatcttttatgttggtggtcatggacgtatgtttagctcctacatctaatcaaaatatatgttctaacaaaatgaaacagccatgttcgacctaaccgaagacccagactccttggccttaatccaaaccctcgcggccgccaacaagcccgttgcagcggtctgccacggaccctgcgtgctgctaaaagccaccgcgccatcaggcgtgcctctcctctctggcgtgacggtgaccggactcacgaatgcagaggaagacgccacaggcctgtcctcggttatgccgtttatgctggagacggagctgggccgtgtcaccggcggcaactatgtcaaggccgccgagatgtggggcgagagtgttgttacttctaaggccgctggaacagggtcgattattattactggacaaaaccctgcttcggcgccaggcgttgcgaaggagatattgaaggccttggggttgtaaaggaaatttattcaaatgtcggtgttaccggagaccccaacgaatatgcagaataggaataaccatctcacttgttctggatcatatgtattcaacacgtcatgcatgtctcatgatttaaattgggtttacagattccgtaggtagaacaaattaaatctgatttgacgtttgattcttttcatctttaaaccacacctggacactcgataacaggtgtgtataggagctcattcagtattcattccaatcttaatcattactcttgtaaccttgttcgacatgtcgatggtttccagggtcccttttcagctctcaggccggtatgccgagcgaaaccgatgggaagttctcaacggcccaggcgactcacgtgtaactggaattcaaatcatccaagatgaaggtctagttaacaaatggagtgacaaggttgttttggtcactggcgtttcatctggaattggtgttgaaactgtgcgcgtcttggcatctaccggggcgactatctttggcacagcccggaatcttgacaaggcgaaggaagccttgaatgatgtactcgatactgggcgtttgaagcttcttttcatggatcagacagacctttcgagtgttcgggcgtgtgctgcggagtttcgcaaagagagccccaagcttaatattcttatcaacaatgccggggtaagctagtcgaaacaaatttctcaaagatcgtccgcccactatttgatcgttataggtgatgaataccccagaaagtcgtactaaagatggcttcgaactgcaatttggaacaaatcacctatcacatttcctactcttctatctactgaaagatatcctactggaaacctcaacgcctacattccattctcgtgttattaatgtttcctcgtcgggccactgttatagccctatccatttggacaatgttaactttgaaggaaattataatggatggattgcttacggagcgagcaagacggctaatatatatatggctacccaaatcgagcgtttgtatgggacgcaaggtcttcatggctatagcttacatcctggggccttcgtgagccccaacctccagaaatactcacaggaagaaatgaaagcagcgatgcaggacaagcgcgccctcgcgtatttgactagtatcgagcagggctgcgcaacgactatttatggctctgtctcgagtgaactggaagggaaaggcggattgtacttggaaggagcatctattgcagttcatccggctccctcaggcgcggatggactagaatatggatacagcagttgggggtttgatgagtcaaaggaaagggagttgtggaagctcagcaaatcttgggtaggagtagagtaaatgttaaggattatcaacatcaccatatatataatcaagtggatgttttagttccagagctatttgcttattgctagtattcaattaattgacacgataaatcgatagaaaaaggcaagaaaacattgtataactcaacaagttaatgatcatacagtgaagaaaaagaagacattttgttacgagccaattcgattcagaagaaaagagtgcaattcaaaccaaattctaagtacaaagaagaaagaaaaaggagaaactatttgagtgcgcgttcttcccttctcatacccttgcgtttgttctcgcttaatctcgtttgtcaatttgggaaggtgtgagggcgaggtcgttcctgcctcgtctggcaagtacgatccaaagtacgatccttcccagattgtcacagatataatacattcgcgcacatggtacatcaaacgctgcctgaggaaatccgaggaagatcagagtttgctggagacaaggtagggaatgttcttggcctcgtatagatctttgtgctcagacttgatgatatccgcgccctagattatattacgcattagtcttaccctgggagctggcggatctgtgactaaccttctcgccaatcatgtagaccgagttttgaatacggcaatcagggatcacggggatgatagaagcatcggcaattctgaggtttcggactccgtggactcgcagtttggagtcgacaacaccctggtggatgctcttcgagagacgtgcggtaccgcatggatctgtaaagtaaatcattagacttgtttcgggacattggaaggggtgatctcacggaatcctgtctggctgcgatccagaacagcccggttcatatcatcatcggaatcaaggggcatcttccaggggtattctgaaataacaatgtccttgaatccagctcccgtggtcaaaagatcatatgtccagcgcacaccctcccgcatggccagaatgtctaagtcattgccgaagaagttgaggttgatattcggctgtacctgtgcgttcgagctgtttagggtgacttcaccttcagaaaggggccgcagcagatcaacaatgacagtcatgtgatttcccttgtcaggcatagggtaatgccactggaatgcgctgctgaacaagccgacgaagtccagctcgaagtgaggttgtcctgctggcccgaaaggatccaatcccccattggcagccttagcctcgagataggcagggtacttttccaggcgttcgtcaattcgggggaatccgacaagttccaggaatccggagcttgcaggaccagtcttgtccttctgataagtggacagcgccttgtcattgagaggaccaggcctgaggatatggttatctaagctgtatccatccttggtttcaagaacgaaaggtacgatgggatggtcaagaagatgctggccgacgtgaggggattccacaatgggggcgattccgtgttttgccagttccgctgctgggccgactccgctaagcatgagaagcttaggagtctcaaagacaccttgagagagaatgacttctcggcgggcgtagacgctgatctcgtgaccagaagcttcacttatcacagtgacaccggagcagatgcgtgtggcagggtcgatgagcagcttcttcgagttaacgccatagaggattgtcacgttaggcttattcttcagataaaggaagctaccctggcgttcaccctggtggatggtatcaacacaatgggttagacctttcatctcgccggagtagatatcctcgctcaggggctggcccttagaaacccaggcctcagtgagcgcatcacggaacggcttcatctccggcaccaagtcggcatgggagatttgcaaagggcctccggttccaatcttactcagttcggccggatacagcttctcgtcgtcatggtaggtggcacatttgcggaggtactccacacaggaatcccaattccagtcatggccaccgaaggcctcccagtcgtcaaaggtaggcttcgagcccggaatccaggtgaagtagttggcagttgaactaccaccaagagcctttccgcgagtgttgggtttttcaacacgctcataatcatcgcgcttgatcatagttgtcttgtacgcccagtcgtacttgcttccgcgaagggtgaaagctttcgaaggggtcgtgatttgctcgatctgatcagggttggggatgccggcttcaacgaccagaatgcggacgctggggttctcagcaaggcgaccagcaattgcattgccagcagtaccaccgccgacaacaatgaagtcgtactcagagccgttggaaacaaaagccatggtttgggatttaataagacttgtgtgtgtgcgtgtgtgtgcgtgtgtgttcatagcaaaaactaacgagacatcgcgtggatcttatattccactcttcgcatgtctccaaatagaccatcttgccgctcttgccggatagtaagagatgtgggaaatggagcaacatgttttaccactagggccaaagtcctgggtatccatttgggggatagaggggccatcttactgacaagagaggcccttgaaccttgacttggtagggctgacagaaagggtaaatttgagttggaggtgttctagaagggacttagctccgaaagtgacgttttcgacccctcatgaggggaaaaccccttctccgcacgagctttgtcagatttccagccaatcagagattcggcatatgtcgccaggaacggcaataactcggccgggtgtcggtaaaccgcctgttgcaaagcatctccactatattgtaagctttccaaacccacttgttcaaaatatttggttttgtctcaatcccctcacgttaatatggaatgatcaaatgatttggagtgtccctcatggggggtgctgtcaaggtcttgactcacgtttaagatccagcccaataaaagccaggccgtttcctagaatatagagtattcacaacttatcatatcaattgaatatcccttgtacaaccaatcccaatgccgaaccattttaccttggccgaaggtatagtaccaaatatctcaagtcaacgttcccatcctgacaccagacaggtcaaccggttgcggatccatccgtcagcactacgttgcctacctttgggggtggtggcctcacaacattgggtgacacgcttctcattgaaacactttcgcatttcaaccgcgaacgtatacccgaaaggtctgatatcattcaacataatgcttggaaggaaaagatatcctaactctataaacagagtcgtccatgctaaagctgcgggtgcatggggagagtttgaggtcacaaacaatatttcctccctcacgtcggccaagttcctcaatggtgttggaaagaaaacccctgttctattccgtctaagcaatactggcggtgacaggggcagtgcggacactgttcgcgatgtgcgaggctttgctgtcaaattcttcacggaggaaggtaatcatgatattgtagggaaccacattgtaagtgttcaccctaagttcttacttttcatgttctaatgtctccgaagccggtattctttgttcgcgatcctataagatttccttctctcaacaggagccataagagacatcctgccaccaataggccagattggcccatggtgagtgctaatcaaagttactgagttgcggatgaagctaatcttttagttctgggatttccactcaaaccaaccggaaagtgtccatgctctgatgcacctttttggcactcggggtattcctgattccatccgtcgagtgacaggtttcggtgtacataccttcaagatggtgtcagctgatggtggcttccgctactgcaagttccacttccgaccaactcagaatatcacacacttttctggccaggaagctactcgcatggctggtgcaaacgccgacttccacaatcaggatttgtgggatgctattgctcggggggacttaccggtctggaaactttacgtccaggtcatggagcccgagcaggctgaaacctacggccgtgctctgtttgatatcaccaaagtttggccccacaaggaattccccttgatcgaagttggtcaaatgactctcaacagaaatgtgggtaacccattaccttagacacgaagcaagtgctaacaagccccagcccgagaattattttgccgagatcgagcaagccgcattttcgccttctaacatggtgcctgggattgcaatgacacccgatcctagtaagttcacactgatgtggtcgccagagggggataaaccactaaccattcttatctataatagtgttgcaggcacgtatgttcgcttaccccgacgctcaacgataccgtctgggagtgaactacacacagcttcctccaaaccgtgcaatatgccctgtatatgcgccattcgagcgcgacggcacgggaactataacccggaactatggcggtgacccgaactatgtacggagctcactaggcgctggtattcctagccaggttgtttccaacgtacgacacactgagcgcatcgcgcataacgctgtcctcggccagaatgagattctagttgatgatgaggatttcattcagccccgagagctgtggaatagggtctttgatgagcccgagagaagggagtgggtgtcaaatgtgtctgagactttggaagaagtgcctgatgagcttaaggatgctgtcattgccatgttcagcaaggtggatcctcgtattggccaattgttaaacgataaggccaagaacagtgcgcgtctttagctctttggttacttttgacactagatgcaatgaaacacgttttctatactcatacgactctttcttactgtccattacacgcaggatcagtaataaacaactcattgatgtgcaagtggtatcacatggtgcttgccctaggtgcaataaggtgttagagaagagaacaccatggggtgactactagaagaagaaaagaacattgaaggtgcctgcgtgctatctctacctcaggagtggttttacggatggataaaatgtccgcttagtcatcctgcgctactgttcaccgattaccacgtgatcacgggtcctacctccacactgttgtgtccctccgaggtccattgtttgtggccacccgcacattataggcctttcatttttttgttcttggcacatctcgcatcccgtccctgaagaggctagacaccacttatttgaatcaggatgtcgaatactacatctccagcctccctaaatgctgcttcctagggtcatactgttgccgttagtctacttctaggggcgggagcacaaccagatttatgtcatcctagtggtgaaaggaaaggtagtccactgaattgcgctacccgaaacgctaccgatattttgcttcctaaatctctgctcgattttggcgcagatgtgaatgccagtggaaatgatggcaagaccggacttattcatgcggcaagaattgacaatgctggttttgctatgctattattggaatatggtgccaacatcaactcggtatcagccgacggatcaactcctttgaccaccgcaattatctacaacagtcataatgttctacgattgttccttgatcgatggcatgagtattcgatctgcccccgtatgaagggccccaaccttctccaggtcgcggcactatatgctgatcctgctacgctgccttgagcatagatgcggaatacgagaaagataaacaatgtgcctgtgagagcccatagtacaccctaatatcaagaggtcagttaggtatactaaagcaatattgccattccgttgaatacccactaaaaagactgcctcaggaactctgctgtgctggtcatcaaactctgccattatgactaaaggttcagtatgaagttctggatagatctgtcaaacagtaatatgacaagacgtgagaaatatatcaaccatggaactatatcgccaagagatcagatatatcattctttgttgatctctcgctagtgctgatttggtcatcctggacataattttcgaccagctcagttctattggtgcgggtaagaaaaagcatcggttaagtcctttgagaatatcaagtcagataccttgcgccatgtgaattctacttgaaatgagagtgccgggacttcaatattaacgccactgtcgttaatactatacactctggcgaacaaccatggtcgtgcagcttgaatgtgatatcgaaagactcaaaatccgatgatagctttatgagtgagtagttcgttccgctggaacaattatcaatatggttcacataggacggatatagtgtatcttggcccccgcttgatctgttcaagtatggtgcagccattcatcccatctaggaagcagcccacttcgtatgagtgcagtggcttaatcaaaacggacatggtcggaaaggcatactcacgatgattgcacaactaaccgaaaggtcaagggtgtcaaagaagtgacatccctactgagtctctcgatatctccgggagaccaagaacgcaaattcccatcgagctcggaccccgacgaaatgatcttcgtcattgataaaattcgaatactttgggaagccaaattactccatgtccacgagcgttgtgatcgcccactctttcgggtaatggcgcctcaatttcgacttgcttatcgccgttgttaagtagcgtacatcggcttcatggcaggctccgaatcggtttctgtaagattttgcagtgcgatattaccagaagaccactcggagtttgcttccggggggagcgtgatcaaaaatagcagtaaataaaaataccgattgatctcagcagcgatttgtacgatttcgcgtaattccgtaattgccacgggtataggatactgaataaatatcgctagtcggatctaaaggacctaggttgatactagattagatatgatccggctatcacaccatgggttgcttcgatcagaatctcaaaggataccatcaaacaccaattttgcacacttattcggtattaatacagaaggtgctcgggtcaaaatagaaagagttccaagcaacatgaaggtataggcatgggcagctttgacccgaacgcgcagtcttagatccgcattgagtgcgccacaacggaagtgcagcaaacccaatgtgacaaagaaattataatgcaatcccgagtcctagatctccatgacatgttcttcgtcctctgatcgccctttcccctgtattgtggggatgtggacgttaatctcatcgcgaggtgagtttttcttcgagcaaaaggagaggagaagaaggaggaattctctactagcaaacaagatctagctacggagtaaatagctaggtgaagccctacaatctaggcatcagcatgtgattggtacgtgactgtcataatagttctcgatgtcttagtcctagttgatataatattcaaaaatacctgtagatccctataactggttaaaaatatatataaactgggggatttgacgattcttaatgtcgtctcgagtgatcagccgaagtggtagagttagggttgtcaagggactgtctggctcatctttttgtctctcttaaaatggagtgagctggtaaacttgaagaaatcctgagccccggttgctaaagacgctgaaagagaaagcggtgacgatatccgtggagatctagaaggtggagacccatggaatgtaagtgggccgccccacttaagcttggaccttccgtggtcgtgatagccggatatatcaggcaccattttcacttcatatttacatgattcaggttgttctcgttcttcttcttctttctctctctcttctctgcatttattagatcgtaattccaagattttcaatgcacaccgacagagcaatatattgtcccgaaggctcaaaaaatactagaccgcctgaacacgcagctgccatcctcagtctacctaccacggcaccctctgctcaggacaaatatgcactcatgcaagagtgtaaagacacgagatcaagccacgggcgaacactttaagtatcagcatatagtaggctgcaagccaaactgtgcaagatatcagagattcgacttgtggaagcttcggacagatagtttgtatccaagtttcagttgttattccgctttaaaaaatgtcgagatgagaaaggacataccggagttactattcacataggtaactctaagagtaatgttgtaaggatatgacagggacccagcgaatgcggaaacccacctgtgcaagcaatggcgagccatgtgtatactggaagatggcaactagccttgcatcaaaaaccattggccctttctaatgttatacaagtagtacttggcacagaaggagttcttggacgcgtggacggaggtcttgtgtcacctgtcgacatttatctgccccggtgggttacctgtcaagtcacaatggaaggaacgagctcagaggaaagagcgaaggactcacctcccagtcaattgcgccatcgcacaatccagaatctgtctactcactctgctttctctctcctccctactttcttcctcattcttcttttcacccgttttgtttcccatctaaagcgacacgaacagtagaactcatcaatcttttatcatcatacgagattccaatcatgcctgacccacctccaaagggtaagggtctcgcagtatctgatccagagccgatcgatgagaaagttgtcacggctctggtaaaggatgaggcccaagtcaatggcaacgagttatttgctgaaaatgaccgtggctctgaagatcttgtgattgtcactggagctgatgtggctgctcatcttttgcccctgcgcgatgacttggaccctactttgacatttcgcgctgctatcctgggatccggcctcgcggcctttctggctgtcatgacccagatctacagtgtaggcgaactcgcatatcatctcattcttcattcccacagcactgctaatgaatatacttctagttcaaaccaacccaagtcaatgtctcaggcgttttccttgttcttgtttcctactttttcggtaccacctgggccagattcctcccccgtggtgacaagtttgaggcgagatggagggcacgaggtgagcagggcagactgccttggtggattgctgtcatcaagtttgtgaatcctgggcctttcggtctcaaggagcattcgatctgtgtgatcactgctacagcagccgggtacgtcacggatgcgacgactgtattcgcggcacaaaagttgttctacaatcttcctttgagtcccgcaacggtcattctcggcattatctctatcggcctctttggatgtggcctctgtgggttcatgcggccttttgctgtctgggatgtcgaggctgtctactggggtacgctgcctgttgtgaaatccatccaagggcttcactgggacacggtcgaaaactccaaaccactgaaatacttctggtatgccttcacgggtatgtctctttacgagatatttcccgcatacatctttccatggctcaactccgtgtctattccggtatgtattctatcttttagcaacgttacttgcgccgtacctgactagaccccgaatgtctagtgtctggcttcacaaaaagcaactggtaagaagggtgccatactcaccaatattttcggtggtgctacttctaacgaaggcctcggtctcttctctttgtccttcgactggcaatatgtgagttggggtattacgccccagtgatactttatattaaccaatgagactggtcaatacagatcgggtcaatttcaactgctattcctctaaagctgatacttcataccaccctgggagctggcatcagcgccatgataatgattggcatctattacggaaatggctggggctcgagatcactgccttttatggcgagtaaccttcttatggccaatggaacaacttatcccgtgaaagaggtgtttcctggtggcttgctcgacaaatcagtcattgaaaaatatggattgcctcagatcaccggggcctttgcatttggtctgttcacggccaatgccgcagtgagtacaatacttctatcccgaaccacttgctaagcattacctagattggcgccctcattctccactgtatccttttctggggcaagggcatttggagggtatgtcaacaagcaagggaaggtaagcataatgacccacaccacacctacatggcaaagcactataaggacactccgtggtggtgcttcgctggcattctcgtcgtcagctttgtccttggccttgtagtggtgatcaaagagaatatcactcttccagcctgggcatacgttgtctcgctagcactaggagttttcattacgccttttgtgagtattctcgaacacgaaattttacaatgctaatattatgatccagagcactatcctcttcgctcgcttcggcaacggcattgccactaacaacctgtcgaaaatgctggctgggctcatgcttcccggacgcccagtcggtaacatgtatttcgctgcttggtcgcacaatattgtcatgtcttccgtctccgtgtccaacgacctaaagttcggcgaatacatgagaatacccccgaggatcatgctttggacccaaatgtatggcatcatacttggcggattcattaactatgctatcttgacttccgtcatttcagccaacagggaccttcttgccgagggtaacggaaactcctcctggagtggtgcgaccatgcaggctttcaacactaaggcagcctcctgggccttggccccttacttgtacaagctcggtgccaagtatgaggtgattcctattgccgtagccgttggtgctgctgcagtaattgttcatcgggttttctatcaggtcagcaaacctcaagcagaccaagattgttcaactagttcatgctgacaccattttacgttagttcgttcccaaaatcggacggtttgatgtttcagaagtgaacctaccacaactcatccagtatgccggttcttatacatcccagacacaaacctgcactgttctcagtgggttactctgtggcttgtttacccaaggctaccttcggaactaccacccacgcatttacaaagattactcatacgttattgctggggccttcgacgccggaagtctgttggttatcttcattctctctttcgccgtctacggagcgggtgggccatcccatccattcccaacgtggtggggaaacaaccaaaatggacaccttgactggtgtcctgtttcgaagaaatgacaacgggcacaaagtcggtctcagataatggcgcatgacggtcgatcagagtcatgaaatgtcttgagcgcaaatcttttttttccagcgccttcaaacatttgttgtccccctggaaggttgatggtgacaaccttccggtaattggatctgtaatggatccttagttttaacataattttcgcaacggttatgaatttagcctagatgaacaatctaatcgttgcaattatttttcctcgtctatattgggtcgtatatataaagtattcctcatggtagacgtagcgatatagatgataggtgctttttcgggtcttattgatccctgaatgcccgattgtttcctaaaaggattggcaagatatctgaattgctatcagagaggcttaatattcaaggtaccttacctacctcaaaatgaagcttttgacaccatacaaatttatgtatcgcgaccttttatgtggtttactcgccatatcatcacattcttcttccaagattagatgtacagtcggaaaaggcgggagaggccttaatttaaaggtaattgccaaaacgagataagcatcggcggccatatttaagcgatgccgaagaaccaattacaccattgaagacattaatccagatggcgtgtctaaatttccgaatgatgcaactcgcttggaccccgcctctagagctaccccaacatgtctgagtgttatctaacaaatgacaagtcattacgaatacaatattgaattagtaccaacgctaattgtccaatacagacgttctgctagagctaggtcgcttattttgcgattgtcttattcatgcctgcggtcacaacataacaactcttcctaatgcataattgcgtgatagtcaatgcgacaacgtcgcatggttataaaaggctgaagtagaccgtttcatgctctccttgataagtttcccaaggttccgcctttatctctttctacaattccaaagatgtcgataaatggaataaaaacagcgcatatatctgctagtagttcagatggctcggacgaagagtggcagaagagtggacgtaacaagggagaaggtacatttgagtccagggagggtcatcacttctaccggccgattgacagctatgagggactgcatcgctgggatccgaattttcaatggacggaacaggaagagaaaaagattgtcaggaaggtcggttaaattccataccactaatcaattatcaaatgactgaatttggacagattgatgctcgtgtctgcacgtttgcctgcgtgaccttctttgcattgcagctggatcgaggaaacatcagccaggcactagcgagtacgcttctggaagatcttggaatgacaagcaacgattataacttgggtcagacggtttttctggtctgtttcttgttggctgagatgccgtcacagttgctctcgaagagaatcggcccggaccgttggattcctattcaaattgttgcttggagtttggtcgcggcttgccaggcctttttgaaagggcgtggctcgtatttggcctgtcgagctctgctaggattcctagaaggcgggttgtgagtaattctccttcacataatcttaacgtgggtctgaccgtgtttttagtatacctgatacgattctttttctgtctttcttctacaaatctagtgagcttccgaaaagactgacctgtttctggatatcctataccgttgccggaattatcggctcatttctagcctttggcttcctacacatcaaagacgccaacggcagcggtgcctggagatatttattcgcgtacgagggtcttatcactggcatgattggaatcatcgctgcattctggatgccagcgtcacccgtacaaaccaagggaggattacgcggcaaggacgggtggtttacagagcacgaagagaagatcatggtaaaccgcgtgattcgggacgaccctagcaaggggagtatgcacaaccgacaagcggtcaccccacggcgcttctgggagtcgctcaaggattaccacgtgtggccaatctatgctctgggtcttatttggatgatacccagtacaccatcccaaaattacctcacgctacaactgcggtcccaggggtttacgacgttccagaccaacttgttgacaattccagcagctgtcattgcgattatcaccatgatagcaattacctgggttgcggagcgtacaaaccagcgccttctctggggcgcagcagccgaagtctggaacctggtactgctcattgcgctggagttgcttcctcagaaaagcatgccgtggcctcgttgggcgatccttacgcttcttgtcggtggtccgagtattcatcctgttgtggtcgcgttgacttcacggaatgccggatctgtgcggactcgcactgttgcttctgcgttgtataatatgtctgtgcaagtgagcaacattgcaggtgccaatgtgagttcaattccttgttttactctagatatggatagactatttagaatactaacatttatgaacaggtgtaccaagcaaaggatgcgccatactacaaaaaaggaaacaaagttcttattgcattggctgtcgccagtgggttccttttcatcttcgccaagttctactacgattggcggaataggtacatattcagaacttgtaaatatcaatatggatcagctttgctaacttataacagtcaaaactctgcaaaatgggatgctatgacaagcgagcaaagagagatttacctgcgtgaaaacccggtgttgactaacaagaggtacgttgactagcgctgcagaatataactactagcagtgctaggaactgactatggtgtatagaattgacttccggtttgctcgttagagctatctgatcaggaatttcgagaaatttgcaatattggacatgggtgttgcgatggaataaacatgcagatcgctgttgttcatagaaaatccattatagtatcatggctttgtcaaagaaaggaattcatttacgtcacagttaccaagaaatgagatttgaccttaagatagcatgaaataattcaatttcacaagaagttgatatgcaggcctatcgcgaatagtccgaaattgcaccattgtggctggaatgaggttgttcggagaatttgggcaccatacattgatgttacaatatgccatcagggataggcttggacacgtctttcttcggagaatcatgtacggagtacatactccgtacatgattctacatttccttattaattggggagattgtatagatatcaggaccctgaacattcaatcaccgccttcttgattggttgcaataccgaattctgctataatctccgacactgtatagttttctgtcgtatgaagtagttagtgatgacatataaagcagtccaaactacatatgacaaaagtgacttaattttgctcggggtttacataggtatctaccatctcatacttttgtacggagtatggggagtttgacacgaaagcggtgtataaaattgtaaggcggtataactagaaagcggtacgtgtcaaggcaggcattatccaaattaggaaggcggcgattcaatttacaggcagaggggtcagagccaagggggttcatatcaatccccttgatttacgatttattcaaagtggactgagattgttgagacagatcatgcatcattatatgaactcctcattctcccggcctatttaaacctccattcaagagaccctcaagcctttgattcactctctggaatgtaaggtgtctcataagggcgctctgcctgtggagtaatgcgcgccaagtggcgacgctcaccagttgtccaatcaacaattgcagaatgagccgtgacacggttctatttatatgcagacattagttttttgagccgttaatctataatcaggatttcactcacatcccagacaacaacggtcttcggagcccatcgaacacgagcttgataatcaattccccgacccacatgagccagcaggaaacctagaagggcatcgctctcctcctttttgagaccgacaatactgcgagtgactagtcttggtgtaagcacttgcttttctcaaggagcatgggagtatacttacagccaccattgacgaaaagcgctttctcgccagttaccggatgggtgcgaataagaggatgctcggtcttgaccgggtcccgtctatcgactcccccacgctgtagactaaactcggcctgctcaaccccggaatgcacagccttcaacccgtgcagacgctccttgagcgctggcgaaagccgattataggcctcgacttggttgacaaaaacagtatccccgcctacttcaggaccgtcaaggaggtacaagaacgtagtaccgggtggctgctgctcatatgtgacatcagaatgccatgcgacactgctgttcttcgccgcgagatattcatcgaattcccaggaattgttgttccggtgcacgagatgaatctcgggatatccctccggagctccgctagttgggtggatatggtggcggccaaagtatcctccgaaatcgagggcctcttggatgggcagatcggcgagatcttggtctcttaaaggcgacaactttgcgttgggcgacgagtagagcgagttgatcctttccggcagcggtgagcttgcttaactgaacgcctgtaacctcagagccgatggttggagtcaacttttggatcttggagccttcggtgaggaggtctttgaaggaggggtcggcgtcttttccgtggtcgacgtgcgtaaagggttcaagaggagggtacttctctccatagtcccatacaggcaggtagtttggatgctgcatcattgttagggaaagctatatgtgagagactcaaaggtctagccatgacgtacactagcagtagtctttcccccttcctcgtcaattattcttctcactctgggtttggtctcggttgttgaaggagcggcctttacaggaacaacaacttccgcggtgggaacttgagcaatagatggtgccatgttgtgctaagagattggtagattttgacgttggtcaagtttgagcaattatctcagggatctgtaagcaccatccacttcaatatatataactttcaattccatttgcttcgcgccattttgtcgtagaatcacgtatgaattccttggtgtccgatatacgcgagagtgataagcatcatgtgagaggatcagatacacaaagcacatcaacattgatgccgtgatatccgttctatcgaatgactcattcagcatcataagacaacaaatagatcaagcctgacgtgctataaccgacaataacatcatttacttgccaatgggaatggtatagagtgtggtcttggatgattgataatgtcgagatggcgtgatatgatgcaagtgacaaccccgcaaacgactctaggtccatgatagatgcatgccaaactctgcagtagcgatgacagacgtggcatttaaatggaaagagtaagaactcgatggtaggttcattatttgtttcccgcaaggcgggtaaggttgccagtgatgataccacttaccctaggaataaaggcttttggactctttagagagaaaataggcacaattcaaggaagggaaactagagagtttggtatgaccgagttatattgtgatgctaggtacgaagtgcaaatctagtctgtgctatcatgagtggatacccattagactgactgcctttcgcatcttattccacttctgtgttatacgctgaatggatcattgtcgacattaatttggctggttcgactcttggctttcccttggcgcggattaggcaaaatatttcaggatgctagatgtgaccattaggctcgataggtttgactggactgtcagttctcagtcgcgccgcgagttttattgtctccacggagcaggcagcatataattcagtcagatgcgatgatcaaaattgaaggatgctaaaagtaacatgtgaggtactgaaaaattcgcaatcacattgaaagtggaagtcgaaaagtgacttgctgattgaggagtcgatctcgggaaggagttagcattatccgaggccacgtggtctagatcacgggttgtttccccaggttctccttccgagtcacgtgactaccatccacagaaactataaatatctgacttaatttcaaaccgaaaattgtctaccagaatcataggaactccaaatccgatttcatttagaggttgctaaaagtataatcatagtcaatcaatcctttgcttgctccactggtctaaatatatatatctcaagttctctatcagcctatcgttttttcttctttcattctaatctccggccccaaaaagagagcgaacgaaaagaggagagaaaaatatagttgtaaaaaagagtctttgagcatatgatagcgatctatctgtaacaacccattccatctcaagtttcccttttctctcgtcgcccgtaagcttctttgtttttatagatagcttgttcctatttctttaagtatttgtaccccgaatcgcatgtagattcgtaccgaggaattttttcgagactcaactttctaagaaatatatcttcaacatgtcggaacgatacaactttcgagtagtcctcgcgtgttcggagactaccgccccaacaccttggaggaccaccaacagatccaactccacgcataaagctcaaaatagaagacctggaccttgacaaatcctacattggcactttgatgccacctaaacggccaccgaggccaaagaaaaccagaccatggaccaaatggacaggaagcgagcttaccgatccagctaaactttctcgtggctggcacatgaatgaggacgatcttgagattgagtgagacggccttgaatctaagtgtgcaaacaacgagctaatcagaactcaatagcgatgttgatggccaaatcaaaagatggcatgagagaattgccgagaacataatgcctcatgtttttttgccaaaggctggaggaatatatggctacaaaggcctaaaatgagtgagtcagctatattggtattgcttgtgtgcagattctcaccttgttaaactatagccagatgaggttcccggggtctgaagagctcagctgggatactattcaacgggtgcatcaattggaggctatggagacagagctcgcgagtgccggggatgaatacgatcgacttccaaacattgaggctattttggaagcttataaatcgggtaaacttgattggtatactggtctcgttacatattggtcgaaggggtcccggatctgtcaaccaagaccatttgactgggatgaatttgaagcgatcagctcccactacgaggatcacaaaggattatggaccgaaggggtaatcgattcattctgttttccaaaggtaactggctgacgaatgatatcagctcaatatttctgagaatgatgtttcctatggagctatcaccgcaggtccatgtcgaatctatacaaagctgactcgggtgagatccatacctattatggctcaaacctcttccaagtatttctgacttttttttatctagttgacattagcactccgccttccaggagtaccgtgatttgccgagttggactttattcacaatactggctgcagtaaaatgtccatctatcaaggagatcttaagatgcttcttggtccttttggcgggactattgggccacaaataccggtcatctgcatgtcaacgtctcaaacttgtaatggccctgtaaccaggcaatttattgaaattgaagtcacaattcttgatcaaggtcgccagagaatgaccgcttggactagaaccacgtgctgtctcaatccaggaagctggaaatacaagagcatcccccgactagatggcccaattgtgcacgatttgttatatgtggcaagcgcacctgataactagctcccgtcgtttacacatctcaaccacgaagtctgaactggacctgccagacctgcccctcgctaccaacccaggacagtactatgggcaatctagaggtcccatgccagtcggaaaatttgccgatacacatggtggttggctaccagaaatgctcggaacgttggaaatgccgccagcagcagctggagttcctccctaagagacttataaacctgtcattccctcgccgactgttgcttgtccttgaacttagtcttgattcatttgttctttttattgcttatagtgtattgctgccccagtttatcacatttctcaattgtttgttgagcatttctgttgttatattttggcgcaaaccaagacagccaataaaatcactgttttgttatgttagttaatataatgtttttatggagtatgatagtgtatgtcccatcaaggaccgacatgccatacttatgttatcaatttccccctcgcactgacgttggtcatatctagatatgccttggaacctcgggtgtagctatagatgccgtaataattgagatagagaaatatgaggcttgtaggctcatttcgcagtccgtttctttcctatatttcaggtgtagagcaatgttaaatgctaacggtgccgatccaaccaacataggcggcccatgcagatcgtacggaacctggcagtctccctttaacccctcttcctctcctttccacctttcctctcttctagtactaatacttctatcataaatcacttccaagaactttgtataagagaaaattggctaacccacgaatggtgtcactcggtaaacaaatataatgatcttattccttattagtgttgtgatgcctcaggccacgatcgacacagggaagtcacaattcatattctcaagatggagcaatctgcgaaccgtgaaatttttgtatccaaccggccccgtgatctgcgccaatacgcttggaactatggagtagccaagctctggctgaattccagggaaaaagataatttgtggtcgcatttagccccacgccgcttcttatgcgctgcgggtcgctggtctagattggagacagcgaggtggcagctatctcgtctttttttcattttgccttctctttttcaactgttaaaaagaaattctcactgtgaatcaaagtgacaaagatagtctcaaataatgtgattctagctacattttcgtgactttcgcaaggtcaatataaattgcggaatactagcgtattgcaactagtggcaattcatcaacacttgcactacagggtccacagttaattaccaccatgggaggtctctgaaacggagagaacaatacctttgtaggaatttttcccgagttccgtttttcaactctgcttctcccaggggcctgaattttcgagctcaagtcaatcatccatcatgaccgtcaaagagaagacaagcgtaaatgacgcggagctgggaagccctggggactctaccgaggagtacgaggtcttcaagaaaaccgaggatggcgtcagcttccgcagtgttggctggttcaaggcgtgcattatcttcgtgaaggtcctctttgcgacgggtgtgctgtcgctgccagcttcactgtactccctcggtgcggtaggtggctcgatcagtatcgtcgcatggggcgcgttcaacacctactctttcgtgattctgggcaacttccgcaagaagcatcctcactgccactccatcgccgatatggcggaagtcgccggtggtttcttcgcgaaagagcttaccggtatactcttcctcatcggctacgtccttgtcacgggcagtggtattatcggagtttcaacggccttgaatgcgctttcgcaccacgctgcgtgcactgtctggtggtctttcattggagcggttgtgatcatcgcgacagcttcggtacgcaaactccagcatgtgggctggctcacatatgcaggattcatttcgatctatgccgccgttctgatcgttgttatcggagtcacaacgcgcgaccggccggctgccgcaccccaggagggcccttacgagctcggctacgtggcaatcaacaaccccggatttgcggctggcatggtcgcttccagtactatcttcgtctctacggctggtaccagcgccttcatcccggtgatgtcggaaatgcgaaacccgaaggactacaagaaggccctatacctgtgcatggttgtggttaatgcgtcgtaccttgctttcagcttggttgtgtatcgttggtgtggacaatgggtggctagtccgtctttgggtgtatgtatcctatcctttgcctgataccggtttcagacaatcagctaatttttgatttttacagagcgctggacagacgatcaagatggtatcttacggtgttgcgctgttaggactggtcgtcagtgccacgatctacttgcatgtgagtatatccctcgcaactcacgcttccggaactgacttcgctacttagatcgccgccaaatacatatttgtgcgtatcttgggtaacacgcgccatctgcaatccaacaccgtcattcattgggttacttggatgagctgtacggtcggtctcggtgctatttccttcatcctcagcgagactatccctatcttcaactacctggttgccctaattgggtccgtttgcttcgcgcctctggccatgtgccttcccggtttcttgtggctacacagcaatggtcattaccgaaagggcacactgatgcagaaggttatctacctgctgcactggggaatggtgctcctcggaattttcttccttgtcggcgcgacgtacggtgttatcattcagatcatcgatgcctacgcaacgggaatgattggtatgttctgctatacccgcaacagtgtagaactgcgactgactttttttattaggctccactttcagctgcttggacaactccagctcgtcgtaggtatgggtctttacagtcgactgcttagggatctgcccccaactggagtggtgatatatacgctcaacatggtatggatggttatacaggaattatataatgagggcccgggaggtcataatgtatgttgtaatgagctgttatggaatcgtaacaaattctgttttcctcgcgaaactctgcaagccaaacgctaatgtaggtactgtctccactaattcccaaatgcggtccctcgtgtggctcacggacgcagttccgcgaccccgggaacctacttctaactacattcggcctgacttttgtctatcaaaactttaattccttccaacgttcccgcttagaatttttttccgtcggacaggagaggctcttgtgccacatcccgaggtcctttcccagctttcatgacacataccattatgtatttcagtgttaccgaggtccggctccatcgcaaatttgtggtatcccgtgtggatccacccgcgttccacgaccttgaagttcctggcccaggatgtggggacaggaatccacgatgccttatcgcagctgctagccgctgttgatcttgaccagctcacggtacgaaggcttcattcccgtcccgcggcgctgataccattgcgggtcttcactccacccttggttcgcgtggaagcgaaggattccgggatcaaatgctcgacttttatcattgagcagaattgggactttactgacttctagaaggctgtgggtaccaagcaggtggatggtgataagaagggtatgtttactaggatggcgacatggttcgaaagcgaggtggacgattgatttttttcagcttaggtatgtgactttgtctgattatcaagaccgattaaactaaagtttgcctaagtttacgccttcgatctttccttttcacacgcggaaaatatatatagccgggataccaggcaaggtcccaacacgatcacgtcaaaacatctttggaactaatagaatggctgggtatcatattggcagacctgcagcggaaataaactcctgcatcaagatgtttcatgaagatggcttgtatataaggacattctcaacaccttgacggtaactagatccctaaacgtacatgtagattcaataacatactgctcgtagtcatatttatgccgactttccctcagcagaatcccgcggttgagacaccgaaagagatcgctgatcgttgccgcctttcgtccgcccaatgccaaccatctgcaagatttcccgccagaagccagtaggggggtcgaggaagctatcctcgtaggcatcgatcaagggtcgttcccagacaaggtcggcttcatgggccttgacgaactttgttttcttgatgattttccagatgatgaagaggggagggatgacgatttgcatggtgtagttcgaccagaaggaagacacggaccaaggcttgtatgaggtgtaaccgtagacgatggtgacgatgatcatccaaacgaatgcaatgtatgcacagtagggttggagtcgtccataataggagagggaccggcggtcaagcccctgcgctttgcaagcgcggtggaagaagatgtacgtcagactgatgacgatgtaattgatgagacctggttatgttgtcagtattgtaatcagtgttgggtagcacggattgcatcgtgatttcttacctccggcggtcaccaggctagcgaaccacgtgatgacgatggacgagctgctagaacactgcaagaaggaaagcatagggaagatcatcacgatcaggaagcaatagacgggtacaccgttgcgcgtagtgtaggtgagcactctcggggctctcccttccagtgctaagccgtagagagtacggatagcgcagtaggtgtaggtattgccagcagagaaaatggaagtcagcaagaggctaaaagattacggtcagttttagttcgtcagattcatgttattttcgatggcactgacgcgttgatgatcgaagggaagattgaaatgcccatgtttcgcatgccaatgacatacggcgatgccgaagcagaaccagaagaaccgcccgtcacgaccgccttgagttgcggatcattagcggcacaaacgatacccacagccaaggcgccgccaataaagaagagaccgaagcgaatgtagactgtcttgaatgcattcttgatataaatgcggggacgctttgcttcagctgcgaccatggagatatactcaggaccgacgacggcaaagcaagccgaccagagagatcccaagaagccttcaaagcgaccaagggcgccggtatccagatattccatgaaagagcctgggttgttccagtggcggaatccataggcatcatgggtcgggtttccaccaaccatggtgatgaaggtgaaaaagaacaaggagaagatcagaatgacctttccaccggacagccaaaattcagcctcgccataggctttgacggccaagacgttaaggcatctttgcgagaatcagtattttgatcagacttgaagtgtgtaaattgccaaaatgggcggaagaggttctcacccgtagaccacgatgacaccagcacagatgcctgcgactggaccaggttcagtaatcttctcactccagaaagacaagacgagcgtgaaagccgagatctcaaaaggaatcaaaagggcctcatagaagctaaaagaagtgttagcaaagacagcaggcaaggtttcggcgaagccgaaagtgggacaaacaaaaagttccagccgaccatgaagccaagagcgtcgtcgacccattttccagccaagcgaatgaaaccaccactgacagggaaggcagtggtcatttcagcgagacagttattcaccatggccaaaaatatacattgaacggtaaaggcaatgaacaagctgccaggtccaccgtggtaaagaccggagccgatgctcacgaaaagtgcggttccgatggagccaccaatggcgatcagttggatttgacgatttccaagatgtcgttgaagattgtcggcattttcagccatcacgccttcttggacatctcgaggaccgccctcggttttgaggcccagtgtttccatcacagtgccgttcgattctttcttttctcctaggatagccatattgctttcattcctgtctgcggtgttaagtgggtgatggacgatacggggtggagaattcgcaagcgggagaaactggatgggctgaggtcgcttattcgtctagattctggggtaagggttctgcaaatgttggggtggatcggcggaaatccgggggtggatctgctacaggatggtgggatgccgggctgtgttgcaagggtctgggatttgatcgcgttgtgggcagtgattttgtcgctttggatgtagaaggtgcaatggcaaggcaaatgtcggagatatcgagttagggtaggatttccgtccagtacggagtttagcggagaaacgttgaaactttcctcaagaaaaggatatttggagaagtaaaaagaaggatgcagtcagaaagcgtgaaatgtaggcagcgaaagacgtctaataaagaaaatcagggccaaaacgtggaagtaaaagaggaaactcaaaaagatcgaggttttccctcgaggtacgattagccctaacgcaacaaccccatgcaagccatctaagccatacagaagccatcccaagccataccaagccattatgacgcgcttcggggggttactttcgatatctcccggcgctgattggctcggaatacatatcgcccccgcacgggctgccacttaacccggatccggacacgagccggggcgtggatctcccctggccttttatcttggactcgactacctaaacagtcttagatggactcctcggcgggttatgtcccccaactcagctatgtattacgctcggcagggtgtcctagtctcggtgtgcacgtgcccccagctaagactgcattttaacctcccggttgcatccaatgtctcaattgatctgagtttggaattgtctaactacggagttatccgtatattctagtcttggcatccttgcgtgactggcttatcgtgtgctcggtccttctcacctgggcagcttcgtctgttacgtaaccttgccagataatcttggaaccttggaaccgttaaccttccaaggaagtgccaagtaatcatgagcctgcaatacaaccccctggacgtaatgtagttcgatctgagtagtcaatcgacagaacttggtcgcatggtggatacgtgcagatgccaaggcacggttcgaatcaggtttcattggtcaacagttttgcctctcctatctcaattcttcttctcgcactgggcatatcatgccgactttctctttgaggcttggaaaagcgtagaaattgttgggaagataacgcatttcccctcatatcagacaatcaaatcagacaatcgaatcagacaatcgaagtatattgctcattggtctgatatccgtgcatctctctctttcctctttggttcttatgttagagaagaaagacggtgtgcttgctgattttcttgccgagtgagcatctttagtacagattgtgtgcctgtacctgcatctagaattcatacccctgatcaatggatgaggtcgtagagcgagactcgatcttgccctagcctgtcacatagtaagtctcaatcgacaattagttagtcgaacaagttttgactcgtaatgtttaattttccaatcactgtgtagtacaaagcaggtactccctcttatacaaaatgtcatacatcgaagtgtacatcaatgtggttccacgctaatgagacaaacctggggattaatttgcagatcacgtggccgatttccggggttgctttgaaattcccttgccacaagaggcttgacgaccaggaacacgggatcacgtgataccgctccttgtcgactcccgaggtcgggggacagaaaaaagtttgcttagagttgactcaccaatgtctccgtgttcgatgttgttgaagcgcgtcgctaggcctccggccaccatgatgtgcagaccggtgagtacagcttcctctcatgatcacccaattcaatctgactcccaaaggttcggccccggtggactccgtccttcggcgtcccaagcaggacaatccatcatcccctacgatcggtctcgagatccctctcttctcgttcgctgagcacgacagccttcacccaggccgaaggcttccactcacagcaagagaatgcttcagtgcctttttctgagactcccaccgagagacgcacgccgcaaaccttgacggagaagatcgtacaacggtatgcggtcggtctccccgaaggaaagctcgttcgcagcggcgactacatcagtcttgcccccgggtattgcatgactcacgacaacacctggcccgtcgccctcaagttcatgtctatgggagcaaccaagatcaaccgcccagagcagattgtcatgactctcgaccacgatgtccagaacacgagcgcagcaaaccttaagaaatacgagcagattgagacttttgctggacaacacggtatcgacttctatcctgcgggccggggtattgggcaccagattatggtcgaagaaggatacgcatggccgggtagtatggcggtggcttcggacagccacagtaaccattatggcggagttggctgtcttggaactgctgttgtgcgtaccgacgctgctagtatttgggcaacgtcgcggacatggtggcaaattccccctgttgcgcgggtgacgtttaccggaacgctaccagtaggcgtcacaggtaaggatgtgattgtcgcgttgtgtggactcttcaatagcgacgtgttgaaccatgcaattgagttcaccggctccgaagagactatggaaagcctccttgtggatagccgcctgacgattgccaatatgacaactgagtggggcgcgctcacgggtctcttccccattgatcagactctgaaacgctggctacgttacaaggctaccgaggcagcgatgtctgaggaccgcacaacccggaatcgtatcacgcacgaaagaatcgacgagttgttcgccaaccccctcacagccgaccctgatgcccaatacgccaaacagctctacctcaatctctctactctctcgccttacgtctctggtcctaattcagtgaagatcgcaacaccactcaacgagctcgttcaaaaggacatcaaaatcaaccgcgcatatatcgtctcctgtacgaactcgcgtgcttcggacctcgcggcagccgctaaggtcttcaaagacgccgccaaggccaaccccggcacgactcccaagattgctgacggtgtcaaactctacatcgcggctgcttccgcgcccgaacaagaggccgcagagtccactggcgactggcaggccctcatcgacgccggtgcgcagccgctgcccgccggatgcggaccttgcattggccttggaacaggtctattggagcccggtgaggtgggcattagtgccagtaatcgtaacttcaagggacggatgggctcgagagatgcgctagcatacttggcgagtcctgaagtcgtggctgcgagcgctctcaacggcgttatctctggccccggctcttacaaggtgcctgagaactggtctggcgtggagcacggattcggaaccggatccgaacctaccaccgagaatgagctcaccaatattctacaacagatggaatctctgatcgatcgggttgagtccgccgcagacgagtccaagcctgccacggagattctgccaggcttccccgaacgcatcagcggcgagatcctcttcctcgatgccgacaatctcgacactgatagcatctaccctggtaaattgacataccaagacaatgtctcgaaggatgatatggccgccgcatgcatgcagaattacgatcccacgttcaagggaatcgccaagccaaatgacatcctcgtcgccggcttcaacttcggttgtggatcctccagagaacaggccgcgaccgccattcttgctaagcagattcccctagtcgtggctggcagtttcggcaacatcttctcccgaaacagtatcaacaacgcgctcatgggccttgaagtcccccgacttgtcgagcgcctccgtgccagcttcgttcagccatcctctggcgacgtcgcgggccgccagctgacgcgccggacaggctggactttaacgtgggacgtgaagcgtagcgtcgttgaagttaaggagggtgagacaggagagacctggacagagcaagtcggcgagctcccagcaaatgtacaggaaatcatcgccgaaggtggactcgaggcctgggtcaagggcaaagttgcggagtcaaagtgaggacttattaaccgggccagacgagaacatactgatgtcctcgccttccaggtaaccaccgccatacttttgtctcttgtatgattttgcatatttacattttgtactatttttctatcatcaggtaccatagagaaggcttgtgactgccataacaagtcgtggacaaaaaagtctttttgcatagaattgatgattgatcgttcttcctccttatcgacgcttaaaatgcaatcacataatgagatcagataaatacatctgttatacagccctttttcagacatgagatgtttgaatagatgagtccatcatcctcaccaacctcatcacggcgcgctagccatcttaaaacaagcaaaagcggcaacagccagtgacactgcgctcagaaatgcatctgtcccaggtccgatactactcgagagaaagtcgtcgtttaccgtatagcgcggtattagattgaacgttgttgcaattgccgaccatcctgaaatcgctggaacaaccaacgtatcggccattccaaagaaatactcgaatggaagttttgaagtcgacgatagggcaaacgtcaaagcgagagagtacaactctagaaggcgataccggcgtccagacccaaagcacggcaatgtcaagagaacgaatcgatagcatgcgtgtgcaaatatccacgatttgctgacggcagtgaagacgaacaagttctcgtgaactctgactgtcttccatccaacgcggtgtcctttttggacgatccaaacgaagagggcaacgcaggtgattttgctgcacattccccgaagggtgccgcctgtgggagtcccgaccatcatgccaatgtttgcgtacaccgcaaaattaacataggtcgtaaaggcggacagaaatttcgtctgcaaagaccgatccgcagcgaggaacgataggacagagccgaggccgaggggaagtaaacacatggttttggtcatttcaccgagagtagccgttgtgttaaatatgaggatagtcgcgctgaccccaaggacgacgagcaaaagcaggcccgggtttcgaacagcacacccataagtgagaatgaggatgatggtaagccatacgttgaatgggatatcaatgtacggttcaaacgccgtaagtagttgtgagaaagccatgagatgagctgcgtagttctatctggagctttgactggagcttccccagctgtcgtgcggcccacgcctagctgtgctctcagtatctagaaacagccagttggattttccaaaacgtgggaacaaattgaacccgagaagagtttactcagaaattggctatgtccgaacgagagatggaaaagaccagcataccgcccaccatcgacttcggagaatcgtttttacgcactacagtcccacaaaactttacacacgcctctacctgttcggtggccgagtcgtattccaacttgcaagattatcgtgctgtcttgtggagcatggtttgtatggtaggcggatttgcccgaggctaaaagttttactatgacagctgtttgaactgtttgttggccaaccactgtttgatatattgtttctaacaccctatattctctttggccagatttgacagatggcaaatgatacgatggatgtaggggaaagcaagaccaagaagcatgggcccgaagttgcaagaatggttgaaagaattgttgcggagcgaagcgaagcatgtataaatcaaaaggtcttatgtacgtgtcacgtggccaagttttctcctagctgaaacaatagcattctaatgttccatcacgtgaccaagtaaggtcacgtggcatttggcaaaatatctccaaacctgccatattaacgcggccaattaggaaacgacttgacaatttcatttgcttgaatctcccagaaaaatgactcagaccgatgcatcctgtgcgaagggaatttacgtcgggttttattttcaatgctgataccaattctgagacaccattgaacacccgcagaaagtacattgaagaagacgccgcgatgaaaccccttagcggagatgaactccactgattcatatcgatttcaaagatctttactgggttctcgatatgaagctctcataacctaatttcaagcacgtgcctagagactattgacaggtggtaatgggtgagaatcagaaaacacggtgcaggatctctaatgttggtactgcagaatcaaaagcaacgtatgacaacctctagagaaatccacaccgatgagaagaaagaatatgtatatgttcctggatgatcgatggacgggagagatacaaagtgacaggagtaagagagaaccagagctatgtaggtgctatgtgtgtgcctatctggtctcaaacaataccgaccatactcatcgaagcggcgggttgtagtgactttaacggggagtgtttacacttggacccagaagggcaaatatgtagaccaagggcagtgtgggataatgatggttaattgagactccttcttaagccatctgcggaagactcaaaagttgacgcgttgcgttaatacacaataccttgatatatcatattgctcctatagcaactaccaaaataaagccctacttagatcagatgtttgaacgagaaagtctacattgatataatatttcgagagagcgatggtgtcgttcagagacagacctactcacagcctcctctcacaagtatcacttcacctcctgaggctctcaacataaccatctgaactaaaagtcagaacctctgcattatcatcgaggtcccttctcaactccagcgctttggcgtaaacaagaaaggcttgttcacgcgaaagaaatactaagacaactgaagttccattcaaaagtacaaatgcagattagaaacttcatgtattattttattggaaaatatgtgccctatttagttatgggtgatatggacctgtgtgaagaactcgatccgggtaaaattggattacatagttggatacgtatagagtcattcctgcgattcgcaacatggaccggtctgatgacgacagtaaattatgatttagcattcaaagtctcgcgtgaccatgttcatattactatttgcgttgtggcaaaatcgtgttattcttttctaaatgtattgatctaggcttgtgtatcatgggagtcaattacaaggcaatgaataaggaaagtctaatctagtgttataccctagttgttgcaatgctggcttccagtagatacatgcatgacagcatcatttgcattggaattctctggttttaggtcttgtcgtatgattttaatatcatttccactcacccgtctaagaattggggctaggcccagctggacactagatgataaaacgaagtataaaatacaattcgttggctgattccggctgacgcaatgtgacccattgtttgggtttgacaatacaacgacattgcttttcaatgtttctgagttcggtttataaataacctaacgacgatatcggtcttctattcagatattcatcgttattcattattatcggtcaagctgttttttgactgatttcgcctactataactctagaaacaaacctgtgattcatcgatttcgtgaaacaaagagccttcaccaccgataacgatcatggcaggaactgggaatacgaaagttgtacatgatatcggaaatttggttgttcattttgaacatctaacgcgcagtgatgtcgccttggtcggagggaagaactcctccattggagaaatgataggcacccttggaggtgaaggaatctctgtaccttctggttttgccacgacgtcgctagcatacaggcgctatatcgatgggaacaaaatccgcgatggaataaccaggctgatcaaggactggcaaacgggaaaagcaaatcttgccgaaaccggcttgggaatacgcaatttgatactccgcggctcttggccacccgatgttgaaacagccatccggagagcctatcacgaactctcggccaaattaggaattgagaacccgagcgttgccgtgcgttcaagcgcgacagcagaagacttgccagatgcgagttttgctggacaacaggattcctatctgaacatctcaggtgaagatcgattgttgaatgcctgtcgccgctgctatgcgtctcttttcaacgaccgcgccatcagctatcgccaagccaaagggtttgatcacatgagcgttgccctctcgattggcatacaacaaatggttcgctccgatgccaacgggtcaggggtcatgttctccatcgataccgaaagtggctttgacaagattgtgctcatcaacgcagcgtggggactaggagagaatatagtacaagggactgtcaatcctgacgaataccaagtgttcaaaccacttctgagagatgagaaccttttgccgatcatagagaaaaaatgcggggacaaggcaatgaaaatggtctacggggaagatgtaccgacgcggaatatacctacgtcaaaggcggagcgcgctgcttttgtgcttggcgatcaggaaattcttcagttgagccgctgggcatgcaccattgaaaagcactatggctgtccaatggacatagaatgggcaaaagatggcatcacgggcgaattgttcatcgtccaggcccgcccagaaaccgttcaatcgcgtcgtgacgctggtgtcttcacgactttccaggtaggaaagagaggccgcattcttacgaagggactttcagttggagacgcggcagtatctggccgtctctgtctcattgaaaagtctgaagacattgacaacttcgtcgacggctcgatcatggtgactaaatcgaccgacccggattgggtgcctctaatgaagcgggccacggctatcatcaccgaccatggtggccgtacttcacatgccgccattgtaagtcgcgagctcggcctcccagccgtggtgggcacaggaaatggaacatacgttttacacacaggccaagacgtaactgtttcctgtgccgagggtgacgaaggcttcgtctacgagggtaccagcgaaatttccacccaaacagtggacctagccggcctcccagcagttgatacggatattatgatcaatctcgctaacccagcggcggcttaccgctggtggcgacttccgaccgatggcatcggccttgctcgcatggagtttgtcgtaaccaattatattcgaattcatccgatggcgctcgtccactttgatcagttaaaggacgacaaatccaaggaagaaatcgcgcgattgacagctgggtacagtaacaagcctgaatacttcgtcgacaagttatcgcacggttttgcggccctttgtgccacggtataccccaagccggccattctccgtatgagtgacttcaagacaaacgagtatgctggcctcatcggcggttctcagtttgagccgaaagaggagaacccaatgcttggcttccgcggggcctcacgctactattcaccgctgtacaaagaggggttcgagcttgaatgtcgcgccatcaagaggctgcgcgaggagatgggcttcgcaaatgtcattgttatgatccctttctgccggacaattagcgaggcaaaagaagtactaaaaactatgtccgagaacgggcttaaacgtggtgacaagggtctccaagtatacgtcatgtgcgagataccttccaacgtcatcatggccaatgaattctctgagtacttcgatgggttctcaatcggttcaaacgatctgacacaactgacgctcggtgtcgaccgcgactctggtgagctggcaggcctcttcaatgagcaagacgaggctgtcaagtggatgattgctcgggtaatcatagttgctcgcaaggcgggtcgtaagattggcatttgcgggcaggccccaagcgatcatccggaattcgccaagttcctagtggaagccggtatcaactcgatctcggtcagccctgacagctttgtccaagtgaaaagacaagttcttgagagtgagaggaaacgacttgatttgatagcggacgaacatatcatgctttaatattaaagggatatcttttcggcgagatttttttcaaaacaagtcaaaagttcaaatccattttgtatcctagctttgtacctccttactcctccgtccacacactaagatgtcttcataaaatttttgtttcaaatgagatctcaccttgatgaccatggttgcgacgctttgaattttttttcacgcttattgattctcacggactctcttgagtgtatcgcttagaatctccaccgagtcgcgtatatcagccttctcgttactatttgttgccatttcaacagtccttatgattccgcttcttccaagggccgcgggcaagctgaaacagcaaccccactctggttggaaatggctaataggatagacatctcgtttgtccattaggatcgaagagcagattctggacagggcggagccaattccaaaagatactgttcctttcgcttggataatcctttgggatctgtgtttacactcgttggcaagatctttcgggttgaaagtgttgctgggcagcgctttgtcaatggggaccccgcaaagtgttgccgtcgaccatgcaacaacctctgactccccgtgcactcccaatacctgaagatctattgcatttgcggcgacctagattccaattagccttgccttgaaagaaattgtcgaaccataagaacatactccggctttgtctgctaacattccgcgaagccttactgaatcaagaaaggttcccgagcccagcacctgagaggctggtagtccggaatgctcttgagcgaaggaggtgatacggtcgacggggtgtgccacgatcagtaagattgtgtctgatctgaatggcttcattgcgttggtgatgctctgaataatggcgaccttctggtacatgtgctggatcgtagtttcgcctgctgaataattagaaaaaatcttcttcgtatcgtatctcctacctctgtaagactttgatccggcggtgatgaccacaacatcgcattggcctgcttcatggtgtgtggctgctcggacgcgggttccgctattgcaactgtagcttacatcggagaggtcccgtacctggccgtctctcaagtcgggtttggtatcgaccaagagcagctcaccagcggtggaatttaggattagcgcgtaagcaagagcggcgccaacctggcccacaccgattattgcaatccgagtaatcgcgtttgaatctctagagagcatattgcggacctaagtagagcatacgacccctgtggtgatctgaagattgttaagaggcgcttggattgtgtaagagaagtggaattccgtttcttgcgggatgatactggtttatgtggtaacgccggtaggttggagctttgttccaaaacttgtctatgatatcatcagtttactatccagttcgtagctagcgggcgaacttagattgctaaagattcagaccgagggttaacctcagagtaccaaatttgctaggagtacatcgcttgatggttagctttactataacgggaatgaggaagctataatcgtctagccccgtctgcgtctactaaccacaagaccttaaaatcagaaaatgctatttctctaccatacaaatagtgccttcatccttgcatccaggtgtagcgaaagatcgagtcaaagaaaacatatgagcaggaaatttaatgaaatactcaaaggtataaagtatagatagagtgatgggaacagctgttgagggataatacattgttacgtaggtggaccttaccgatcaccaatcatcgaccaaagatttaggaaactatgtagagttagggaacgaatttcttacgtcataatgtgatgacaaactgtacatggatatctccaatggaatcagttcattgattgaggaaagatgagaacggtcgaaggctcccaaaggtctatatcatcgtgacgcggtatattgcaatgctctgaaaacggtttaaatgctagatagtagagagtgtctaattgattaaatgcgaccaatatttattactagttatagcgtaattatacgaaggagttaggacctagggtgaaaactatagattatgtagcgaaatgccgcataaacccaaaatcaaatttggggattgttaacgcgacacccctgcctgatttttcagtattcaatcttactaatcaagcatcgatttaattttgccggacttaattctggactttggaattttggtttacatagtaaaaaacatgcattttgatgagaagaaaatttcattgcaatagattgttacttaattttgttaagggtttacatacaaattgtacagtggcgttgcatgagtatttgcaccccggtacctctaccattgaccgctctgtgaataccgcctgcctattcctattattataggagccacccgcatagtgcgactggctgggagtgagtacgaagtttttccggcagaaaatagggcccccccccgaagtactagggtgcaaatactcatgaaacatgactgtatgtgttctgggctgcgcagctcggccgggaattacgttaccctaaattaggcggccattgcgtagccaccctttaaccaagtaaacaatcaaccaattaaataattaaataattaaaccgcggtatagccactatgccggcgtaagtacctattgtacatgaggtttgataggaaggcggtaagaaaggcgggcaatggtggcccgaaaagtcaggcaggggtgtcgcgttaacaacccccttaaatttcagacgaaaccgattaagcaaaccaattgatcagacaaatttgcgtatttacgggtagatcagacgaactggtaaggcaatcttctagcttcatgttttttattagaatataaccagactaaataagcgattaaaaaccgcacgatcaagggagctttgtgttctggctcccgcttgcagcacattctagtcggtaaattaacccgacgaaacaaacaccttcatctgcttcttggttgctttcagcaagacagctaaaaaaatcaagattgaaactcgtcaatcagatcctgcacaatctcacatctcgaggtctttgcaatgaccttggggagcggccatgacctatccgaccgttagtacatttgagaatgatcgttctaacggacctcggtgctacgacacccaccaccggtaatattagtgtatacatgtacgcaatttgaataaatgagattaacgttgtgctccggattcaagaccgggatcaagttctcgttgtttgcaacaatgtccaacgcaagggcccgctgttttcaacgggagaatgcgaggaatgcgaggattgtgtggcttagcaactatcaaggagttcagcacggtctgtttataatgctgcagggaggcattttctggacacgtttttttttggagaaagtctttcgcttcaatatcgggttcatactccaaccaactccacaaaatgacacacacgaagtccctgttcctgactttgatgggtgctgctgctctgagtcaggcagctaaagttcattatgatcttgacctcacatggaagaggggcgcaccgaacggagtcgagagggagatgatctttgtcaatgatcgttttccaggcccgccattgattctggatgaaggagatgaagtcacagtgggttgtcctgctttattttcaaagcgcatactgagagaaatagatagacgtgaccaacaatttgcccttcaatacatctgtccatttccacggcattgagtagggcctccggaaattcctcttcgattaccgcacaatactgaaccacaacaggcaaaccaacaccccatgggcggacggagtatcaggactatcgcaatgggccatcaagcccggtgacaaataccgataccattggaaagccacgacctatggtacttactggtaccatgcccacgacaaggacagaataatggatggtctctacggtggaattagaattcggtgagtatgcagcagcatgtatttattatgtctctaacaaggaatcagtccgtctgccgaccgagagtcaccattctcaatgatttctgatgaccctgccgatatccaggcaatgacaaaagccgcccatgatgcccagttggtcgtgatgtctgactgggaccatctttcgtccaatgaatacatggatgcactgaaagaaacaggctatgatatcttgtaaggacccaaatatgatagccaaagaagtaccgcactcacaatcaccagttgctcagatagcattctcatcgatggtgcaggctctgtatactgcaaagaccctgaatatttgacaaacctccaaccaccccaggtcagagcagtcataactgagcctttgacggataaggggtgagtctatactttactaggctgatttgaaagccactaacacttgccagatgcgatcccttcatgccagttctccaaggtaactgggagcaccacccagagctccttcccgagggattgaactccggatgtaagcccagtgagggtccaacgtcctcctttgaagtatcacccaaaaaccgatgggctagtttgaacttcatcagtgcagcaagtctcaaatcgttgatcttctccattgatgagcacccgatgtacatctacgaagtggatggacgctacattgagccccagcttgcgcatcaggtttccatttacagtggagagcgctactctgccatgatcaaactcgacaaggaacccggcagctacacgatccgtgtcgctggtcatgataaccaggtcatctctggctacgctaacctcgcctacaagggcggtgaacataacaagcgcgaatcaacggcatatatcgactacggcggcactaacactacagcctctgtgatcaatctgaacacaacgaacctgccgccatatcctgctatcctacctgcggaggacggcgatgatttccatctcctgacccttggacggatcaactcatcctgggaatggactttggatgggacgaccttcctcccagccaatttgaaccaaatggaaccagtgattctcaaccccaaagcaccgagcctggattctgccctgaagattgagacccggaatggcacctgggtcgatattgtgttccagctcgccatccccgacccaaccaagcttcagccaccccacccgatgcacaagcattccaacaaggcctttttgattggcagtgcaatgggcaagttccagtggggctctatcgcggaagcaaaagcaagcagcccggacagcttcttcaaaacccctgtgtatcgcgatacatttgtgactgcgccaaatggagtggcctggatcgctattcgctaccaagtcgtgaacccaggaccattccttttgcattgtcatatggagacgcacttctcgtcgggtatgggcatggtcttgctggatggtgtcgatgcttggcccgaagttcctcctcactacctatagtgtgttctatgatttttctatcctgtctttgatgtatgcgattttatctttctaattggctccttaataataatcatctgccaacgttcaacctgctactaaaataccactgacgtcattgtttgtttatggaacgggctctcgacctacatatcggtgaatatgagtttaggccaaagacggtagtgggactggcatcatcatcggactcgtagtcatgggtaacgcctaagctccagaaacttggccacgtgacctcatctggtcacctgactatgcatcaaacgggagaaaacttggccacgtgacacgtacttctagtttgcctatacttgcttcgcttcgctccgcaattaaagcagtggaaacttctagggtagggggtgcaattaccgtaatttacggagactcataggaggaacatggataggttgaagtcgagcggaaagatatcttaatctggactattgcatttggagtaggggtaaaactgatttcgaatatcactgtaatccttttgatgactgtaattaggtagcttgtgagctcactaataactggcgtcctaagatgaccgacgttctggttgattctattacaatgtaaactattagcctcttcctcaaagtccgtgcgacaactctctacaaggagacttccacaataggacccttgtagacgtgccgggcgcgcacgacatagtatataattgcgaggaagacgctgcctcctatcgccagaatgctccagttcatcgtctccactgtcgggtccattgtacttggccagaagctgaaaaagatgacgatgctgatgtagatgatcgcatacccgttgatcagggtaccaatgatgccggggcagtggaacggtccccagacaagcttcgcaccgggaacattgacaatatcatcctcgttgtcgttatatcgggagatgtcaccacggatgcggcggtaaaagagcaaaacagaaaccattaagtaagaaaggtatatacccgaaactgccatggacactatgtcctccatagcggtatcggaaccaatgttaatcagggaaagcaacacagcgacggtcactgtcaataggatggcgaaaatgggcaactgtttcgtggaagaaaccttgaatagcagaatgttagtccatacaagacttctgatgatagctaagtgcttacctggctccaccatcgccacccggggactcccctgtctcgagaaaaagaccaaagctgccgagacgccgcagcaagtaggcccatgagagaacagacataaatggtgataacgatagcacacatggccaatgaaccaggcaccgagtttgttgcttccatgaagatgcccatgaagttatacccagtggcgctccccagcttaccaccgaggtcagagtcggtgcagaacatcataacaattatcataccaaagccgaggcagccattgataccgacactaatcataagggcgttgggaataacggtcgaggcatttgcgacctcttcggacatctatttggaggtttattagctagagacgtggaagcataactcccaaagaaacttacatgcacggcggcatcacctccagcgaaggcaaaggcacagctggtcataccaacaaaccaggatagtccttgcgtggcgaagcctcctccattttggaaagatagaaaaacctgctcctttgtgttatgatccgccatatagatgagggggattatgatgccgaagaacccaagaatgtgcacaaccaaaatgatcacctcgatgcggggcagcaagttgccggggagcaagttcacgaccaatgcgagactgagcgaagcccaaacaatcaatgttccttcccagggaagagcattgtagaggttatttcctaggatcgcggcaccctggatcatctttcctgtcaaaaaggcacaggcggcgaaggcactctgccagccgagaacagcaaaccatcctatgggcacaagtgtcagcgataatgaatagtttcggtccgagtatgaggtagaagtttacctgtaataaaacttaggaatttctggtgactgcccggggcaagcatggcagcccagtggtattggcctcctgcggtaggtgccctgtttgacaattaggtccgaatttagccgtaaatcaacgaataatgcaacatacatggaggccaattccgacaagaccatgaaattggcgaaacagccaacccacccgaagatgtaggcatagatcgcaccgccggagccaccgctgatatatgttagaaaatgttgcaaggcagcaggttgttgtcgggtgaacacactttgtcagagggccagtaaaagtactggagaccgatcagcgatgtattcagtgaaaatttacaattgaactggctcacccaagcagaccttcccaagttcccagaatagtacagctgaagccaaggatcgacagaataccgaattttcgctagtcggaagtgtcagtagtatggtcaggtgagttaccttgaagcctgtatttcataccttaaggactggcctctttcccatccgctggagatgcgcattatcacgatccacctgcccctcgcccctgctggtgacggaagtattgctcttcaattcataggccaccatggcttttttgtagaggaatggaatggagacaagtgggaagtgaacagaaagttaaatataagatgcagctgggttgaaagtacaaaaacaggcaaggaaatgtccatcgcccaagtatcggaatgcgggtggacgagtatccgatttgactagatgggtgtacgttacatcgactagaactgaaagtacgtgagtggatgacgctaatgtatgattgttttgatttgattgcgggcgctctgcgctctgcgcttcgccccaaggagggctagggcccatcgtgttctatgtgtcgatcgtgtggatcacacgcgggaatgattccccaggaagcgcagcatacccaattgaatacgccacagtcaatcatgtggggcatatatcggtgattgctacccatagggcaacagtcaattgatgcttgtatgaaactgataagggcagatatgaccatactcggccctaaaaaggtaccttgattttgttgtggtctagtagtaaaatggctgtatcatattccacgggttgacctaatgcgaggggccgggggccagaactcaggggtgaatccttcgagtacagggggttgaacgtgataagtgtgctggatattaccatatcgttttacaataattagtcactgtgagaataaacactgatcagtgtcaaagtagggaaaatgtaatgtagaaatcagagcaaacacatatagaacacatatagaacacaatgcatatatagagatcgatggactggaaacacaagattggaagccctagaggaactataacatctctttgaagatcttcatatgcatagtatattagactgataggtactggaatgggattcgcatcctagtcgcttttttctgggcactatacggagtaccagacgatataataaaaagcacaaggcatgttttctcttcagcatgatgatctctaatactctcatccttcttctttcttcttaagtaatccaccattcttcacatatttcggctcaatggggacacgattcaaaggtgacactaaagatccagcggtcaatgtcactacatgggttctcttagtcataatcatttttagtgtctctgctcgacttggaactaaagttcgactgttcaagagactcagcacggatgacctcttgatcattgcatctctgattgtcggtatcggtcagaatatcgctgtttcactggcagttgggtccggttatggaaagcattccaaagatgtctccagcgccaatatgcaacaggtgatgaaagtacgtatcttccgccaccttgtgatttttcacttctttggaacagattttaatgtgcttgttgccaggatcttttcgctgtctctcttctgtacctcctaagcctcatgttctcgaaactatctctggtcgtgtttatccggagtcttacaccatccgccaaagataaatggctcgcccgaggtgtggaggctatcgtgtatgtctgggcagttgttgctatctttggaactgcattccaatgctctctgccccgcgcctgggacttccagaacggccaatgcattaacctggtaggtagtgtctccttttgtccctattacctcctatcccccgaagccggacaatactaacgcgaaacgacgggtgtccagttaacttggcgctacttcgtcgctatctccaatatcgttaccgacctcttgattgtcgctcaggcaatgatcctaatttctagcgtccaaacgacgctgttgcgacgcctggcttttgcgggtatcttcctgcctcgacttctgtgagcgacccggctctacggagtgctctctcttgaactcgaaactcatctccctccgtcgatagtgtaacgatcgcaacggtcggcgagcttgcctttatcaaaaaaggcactgaatccaacgacccaacgtttcagatgtgtgaaatcactattttcgaagtggccattcagtgtctcagcatcgtgacggcctgttggggacaactgagcccgttcctgtcctggatgcgatctaacgggctcaagctcaatggtgtggaagacccaacctcgtggagctataagatacgctcacaatcccaggggcggtccaagtcgcgagaccgtaagatcaggtctgaaagccacgaacttccccctttgctgatacgacgagatcagattttggtcacacaggattgggagctcgacagccagtcaagtcaggcgcatatagtaactgagttcgacacacaatcctaggctagcaacggtggcaagtgccaagcggttccctaatcaacttagctaatgactataaattcatcatgggcgcgacatgcatagactttggtaatccccaaatcacatggaaattacgtgctggaattaaatcggaaaataatcagaataatgagcacatgccgcgtaatgatggctcccgttatagagacgcgcatactatatgtagtgtgctttttcaccttccaaacgaaccttagggacggatctggttccattcgcaatcgcgatcgagccatcgtatgatgggagatggggctgtcgcgggccaacgcataaaattctatactaccggacccaacgcacggcccgaaaccccgattggggtgttggggccgcaccctgtagaacagtacttttgtgtaggatgcttaaacctcaaaggggttagtggagaaagcgcagggcggagtgctggccaacgcagtagctaggtttctctttcgttcaggcgtgcaggaaacccttgcaactagctgtcttatcggctcgcacctcttccctccccgctcctcgaaccccttgaaacgtatctcaacgtcccgacgaccattatgcgggttttattgtcacttgggggccatattcctttctttgtcaattgtattaaacaggtctactgtcacgatctgcatgatttacctatcatatcacgtaatgctaattagagctggtttgataactattttttttttgctagtttagtagttttagcgagaggttggttgatatatctaccctccgaagtagattcttacgtcttgctcttttcttccccatcacggaatatattattttgaactaagttactctttacaaacttggctcggcacacctaccctagtgcaaacgttttagtcaccgccctttcgctagacatttgaacacatatccagccggatttcaatatggggtcggcaaccaatcctctcgtgctagaactagcgacaccagaagatgtccctgccatcactgagctatggtttgctgcctttacgcagccagtgattgggaaacttttccccaacactcccggtatgcaccaatggcaccgggattggcacttgggggacattcagaagtcccactacagatacctccgagtagtggacacccagtcaagagatgaaaaaggccgaccgcggctagttgcctttgccaaatgggacctagccatgccaaatgagcgaggtcgtcgctttccgcattggcatgaggactcgccttaccaggaatgcgaggatttcattgcagaactggagcaggcgagggagaacgtcatgggcgatgagaaacattactgtatgaatgatatccctttaaggttcacaaaggaagaaatgatcactgacatccgaaaccgaaaaagacctcgatacccttggcactcatcctgattatcaacggcgcggagctggctctatgcttgtcaagtggggctgcgacctggcagataaggatggcgttatggcatacgtggatgccagcaaggagggagcatttctataccagaaacataactttgtggatttcagtccgcctggttcggaagtggcttcgatggctcgccgccatcaggtggttccgagcgatcacacttgacttacgaactctgagtccatgctgcgagatatctcattgaagataaagccataaacacatttgaactcactggttcggattgtagctcatttattgttatgtttctgtctagcaagtatatatatattttatgcctttccccgccttttttgctgtctacctagcaagaacaagataccttaacagaagggctactcacacactatttttcgctagtaacacacatccactagctctcaaccagcttgtgtaaattactgtggtatcctgcctatcacatgacttacgaccgtactatgaaacaggatcaggtgatattacttcacgtgatttcaagttgtggagccgcaaaccttaaatgagcgcatccatgggtgagtcccaagtcccggatagagctgagatcgaaacatttggtataactccggggcttgatgacagcgttatatttgatcacccaatcgtctattatggcagaccatcatctcttgttgaaacctttacataattaggagagaatgttgatatttttgttccaaatataaaatatttctgaagcgtcattttcacttgatttctattctactctgcgctaaactatatgttgaagcggtaaatccacaatgcgtagtctgacaaagcagacaagacaaataataccagccttccaagtaggtcagctggcaagtataggagaccatgggacctgcatttctcaaaacattattctcgttcagtttgtgggtgatgatacttctatgagtgtggtaaaactggaaatacggtcttaaaaacagggcaactacatcatcatcccgattttcttactacaatgtatacaatgttttaggtatctcatactcattacgtgctacgaaagaggttagagccagattgaggtaaaaataggcttttgtactcgtttcaaccctgctttctataaatataagaaaagcccgcatattattgataaaaagaagaatcgtgtcccaatctatagcaagagctgttagcacttccagacaagcccattgcatcaacaaaagaaaaatgcagcaaatataaggaatctctaatatctgtgtatattttcggtaaatggtagatctagattttagtacacgcagagaatctgacctatatcgggttagagtcttgaacctcaggttggagaaaagttattaccgattgaccatatagaagaggaatttcacccgggtgtgacgtgctagatgtgagagtgtatcgattcaaaataaggaataggtagggagaaatagagatagagcaggtgcagaagttggagaaggcctgcttgtatagctggccacttctgtaaacatgtaagcattgaagagaaaaccctggagcggggacaggggcaccgacagccttgcctgcgaaacaggtgcgagagaaaagccgtcactgggagtactagggtgctagagaggagattcaggagaataccatggggtgactactgagaggagaagtgaaaagttgtctgcattgctatctatgcctcgggagtgcttttatagttagttaatgcagtagttagttgggttaagaaacagatggacgaggcaaattaatcccaaatatatgttatattactgagcgaagcgaggaaacctgttattatatatgtctcatcaactagtaaacaagcacatacgaccatagggtgtggaaaacagggcttcccgtccgctcagccgtacttaagcnnnnnnnnnnnnnnnnnnnnnnnnnnnnnnnnnnnnnnnnnnnnnnnnnnnnnnnnnnnnnnnnnnnnnnnnnnnnnnnnnnnnnnnnnnnnnnnnnnnnnnnnnnnnnnnnnnnnnnnnnnnnnnnnnnnnnnnnnnnnnnnnnnnnnnnnnnnnnnnnnnnnnnnnnnnnnnnnnnnnnnnnnnnnnnnnnnnnnnnnnnnnnnnnnnnnnnnnnncgccggtgagttagtagttgggtgggtgaccaccagcgaatcctcactgttgtatgttttttgttcacgcattcttttctattcgttcagaagctccctctttttctgatgttagatatccgcaggtcggagagcatgggaaaatatgtgacaccaggatgagtcgttcacctggtggacctcaatttcaaggacggtcttccgtcatctcccaaactaagttgatttctactagatacgtctctatcctcttcacccaacatggatataacctggtctcaactgggacacagcttccacggtcaacaagaactcaagatgcaagctacggaaaagccgactcaatcaggaattgacttgaccctacctgaagagaaaactcaagatgcagggggtgctgtggccgcagctgcgaatgttgcgttaatcgcaagattgataagacacggcagcttggaactggactttctacggtggtatgtggatgttgtcaccaagctcggggttttgagcttactaaaaaagaaaagatgggattccttacaaattttcatgtcgtggacgacggcagtggctaccgccgaaggatcaatcgagcttcaatatggggattatctcttgatggtcatgacagtccttttgatgtgattgtgatgcctccaggatgcgagaaggttgttccaaagagcagctgataaaaggcaaggctgaacaagtcgatgaaacgtttattcttattggcgaagaggagaaggagaaacttggcgaggtgcctgcctggtctccatgatttctttgcaaactctttcttttgtctgtgaatgctcttgctttggtggtcacgggccgatcacatgccgttacctggtttgtcaggcttcacctagctatttagctaattaactagttctcgatcattgtaaagaatctatccttcttcatctctctctcgccgctacaagagctctgatctaaactggcagttacccccgaggtttaacctctgtatgttttcttcctattcaggaacagtcgttcctgctattctagttcacggctcacgtgcaccttgctacctgtcagagcacttttagattctgtaagcttccccatcagcatcactcgatagattcataaaaaaagagccatctgagatcgtaagtctccctcgcagtctttccagcagtctttccagcagtctttccaccagtccttttgaggggttcgttttgctaacgtctatctaagatgtcttttgcctctactgcccctgtcactgagccctgcgcgtcctccactatccttgcccttcaagaggcaataaccgaagtcctgttggccctttccccacacgaaaccatatggtttttatggcagatgctcggcctatatatatgtctgttgtttgcatggagggttgatcaacttcttgagaatatgattgaccagtatgtctcattttttatggagctctgtgaagtcggatacttacagaatttacagttatatagaatttacagttattgtccacctcggaacgctgtagcacgccgagcactgtgatgtagagttctagagagcaggcagtgtagacggatcatcacccctgaaatgagaaatgagttgcgagatacttctgcactaggagattgtatactatggtgtggtctatgtgatacctatgcttgctagccggccgtcctggatggttggtgttgttgtgtcgctctcgtcttgccctgcttggtcaggctgcccatcgtgcatatccctcttcgttataaagattgatttcttattgaaatttggtagaaaggcaagaactccttgtatttttttaaacccattttattcggattcatcaatccgatagactagcttagaggctcggactttaccttcccgtaatatctgaataccagccaacgcaccggccaagctgcctgacttaatctgatatggatggggttgaatgcggcggccctcgagtaggttctgcgctgtatcccaccatttgatgccgaattcaaggttagcactatcaggggatatctcggtcgttcccatgcgataggcttcccccaggatgtcgtacgccattgagacatgcgagtcaacgtcttctctcgcggatgaaacatctagcagggcgttataggaaccgcccgccgacgaaatggcagcgctgcagatggcagcagattggggcgtcgagattgtatcaaaaacgaattccagggcatcatcagtatcctctcggatctgctctcccaccagtggatcgtggtaatcaaaaactgcgtctgccccaagctcaaacatgaagctgcgattggcttcagagcatgttgtgacaactcgcagtcccgatagttttgccaattggatcgcgagtgtaccggtagcagttgcccctccatagattaggatatttgtgtcgtctgactcgctcgactgattcccggggaaaggcaattccatgctctgataaagattttgaccaacagttgtcaaacccacaccaaaggtagctgctgcctcaaagctcatggactcaggtatcaacatttggagatcgcccttcgcaataatatactgagcaaatgcgccgccattgtggcgaacggcattgctaccgtgtacaaagccagcaactcgatcgccctttttgaaaggctttttgacgagcggccccacggcttctactattccggaatagtcacagcccaccgtggccccggtacagggtacaaaatcaatatgacgccagtccgttggattcaaagcgacttcgtacttgttagttcaactattcatcaagcacgggagcgaagaagggcacaaggagaaaataccggcttttgttttgacgagaatgtaattatccggcagcctagggagtgggacatctaccagcgttgcgcgaccaggttcttggacgacaatggcgctttgggtggtcattctcaacagatgtcgcgatgcgagggaaaatgaggggtgcgagagaggtgggggtatggctctaatttctttagataaattgaccaaatggcattgggggttgcaaaaggggtgtatactattgcactccgtgcgcaattctccgtacgcggcctggaattactccgtagagttgtccatgattccgggcgagattgaactattggagatctcagacaaagtacggtttgccgcgcgataatctatctggctactgcgtgtagcttccaggatcgtcgaaatacggagtattgtaagtgatctgcgtggaggggaggggcaagcaagtgttagtagcttcaataaagtcaattaatccattactattgtcgaatgtgctccgcagcctagaagatctcatcgtgatattgagaccgggtagcgcgggcgatgccagtaaatggtccctcagttaccacagcccaaacatcaccgacgcgagattagactcaatgataatagcccaatggatagccctcgatatagtgcaacaggcaatattgagattctccaaaatacatccatgtcctccgtacggagtgcggagcaagggaatcgcaagtacccggggagtccgaaaagtggaacttgtcgcaaatagggggctgggaaaagaaagtcgttgctccactacgggatgggaatcccctcatgagaaaaatcataagaagaaattctgataggcgatcttcggctacaaacattggcttggtgcagcttagcacagcttagtgtcataatatagtggagcatggaacatttggcaatcgtgaaatacaatgaccgatactggtaatggcttgtcacagtataatttataacgtatgtctggtctatcttaagggatggacgatccagttcgttgatctatggagtagacaatctccacttggcagcattttcgtaatcttggcctcattggcatccgagcagattccaacctgcagaatatcatggaactgggtatagaatcagagctgaacaagcatggagaataagatcccacagcattagccatatctattgttccggacttgtttctagcgtaggaaacataatcttaccaagccaaactccaacggatgtgcagaatacggagtagattgaatgcacgaggtgcatcgtccgtttttctatgagtctccactgcatgttctccgatagccagtaaaatatgcatgaatatacaaatttacgcattaatggcattagcgccgagagccagtttcatggcaatcagaagaatgcaaaacattgagtataataacccacagcatcccttcttattcttgtccacgctcgtcctcgattaattttataccccgaagatgcctagtctaccagcaacgacttctgtacctacagatatggagggaattgcagtcattggaatggggtgtcgcttctctggaggagcgacctccgttgagaacttctggcagatgctatgcgacggacgtactgggcatgggacagttcccacaagccgataccaagcttcggcctggcatcaccctagccatgaacgcaaaggagcggtatgaatacctcaattagatgttagtttactattctaacaggatgaatagatcaatcatgatagtgggtttttcttgcaggaagatccatcacggtttgacgctccttttttctctatcactgccaaagaggcggcgggcatggacccagcacaacgtttgttgctcgaagttgcatacgaaacattcgaaaacagtaagttgagtgattttcacgtttccggaaagaagtcagctaatagggaaaaataggcgggataccgatagacacgcttccaggcagtaacacggcagtgtactctggttcaatgaccaatgactatgagctattgtcaacaagagatatctatgatatgcctcacaactcggctactggtaatggaaggactatgctggcaaatcggttgtcatggttctttgatcttcaaggcccaagtatcatgatggatactgcgtgttcttcaagtttgactgcgatccacctagcagctcaatccttgcggtctggagagtgcggaatggtgagcactgcaatctgatgtctattgatcacacagactaaacatgcttgtgacaggccttggtgactggtgccagtcttatcttgcaccctaattttacacaaagactgtcctacatgcacatgatgagtgcagatggcataagtcattcatttgatgagtctgcaaatggatatggtcggggtgagggcatcggtgctgtgcttttgaagcccctcagcgccgcattagccgatggagataatattcgagccgtcatccgcggcacaggaattaatcaggatggccggactcctgggattacactgcccagtccaacgtcccaagccaacttgattcgttcggtttatgaacgtcatggcatctcaatgagagacacttcctactttgaagcacatggcactggaactcctgtcggggtaagcaaaatagctccattgatggataaaaagccatcgtttgattaactcaatgatgaataggatcccatagagctgtctgctgtcggaatgactttgggccaggcacgaacaccgactgatgagccaatatacgtaggctcagtgaagacaaatttcggtcacaccgaaggagccgcaggagtggctagcttgatcaaagtcgtgctgtgtttagaaaagggcacattggtgccaaacgccgggttccaaaacatcaatcccaagatccggctcgatgattggcgtttacgcctaagcgacaaaacaatgccctggccagaccatcttccgcagcgggctagtatcaactcatttggattcggtggatcaaatgcgcatttgattctcgaaagtgccaaagaagccctgggcaatgctaaagaccaggagccggcccctcatgtggtggtgttttctacatttgaccaagctggtatcgaacggaccggtcaaaattggagcacatttcttcaacgtcaacaaaaagccgagcgggaggcttcactcaaagatttagcccatacgatgttgacacgccgatcgcagttaggcttccgtagcttcgcagttgctaactcacaagaccagctgcagagcatcttggataaaggattgcccaaatttccccgagctagtcgcaaagctcaaacaagacttgcttttgtgttcacgggtcagggtggccaatgggctggaatgggccgggagcttttgaggattcccactttcagggaaagtatagcacgatcacaggaaattctttcgtccctgggatgtccctttgatatggtggaggagataaaggcggaggcaaaagacagtcagataaaccgacctgatcgcagccagcctatcacctgcgcattgcagattgctttggttgatcttctggccagttggtcggtttttcccaacgcagtggttggccactccagcggtgaaattggtatgcaaatctccgttattctcgcttcaaacaagcatccaatgatgaataaaagctgacttatttgcaacacgtagctgctggatatgccgctgggtatctttctcgtgaagacgctatgcgagtcgcatggttccgcggtttcttttcgcagcagattgcccagagtgacagacgaggtggtatgctcgctactggtatttctgcggctgacgcaaagaagtacctcgaggagctgcctgcacgttcagttgtggttgcctgtgtcaatagtcctgccagtacaaccctctcgggtgatgtggaattcattgatcagcttgaagcaagattacaacaggatggtcactttgcccggaagctgcgcattgatacagcttatcattcccctcacatggaagatctagttaaagtggtaggtagtgctatcgattgtatcaagcctgaggatcgatacaatggctcaattcccatgctttcatcggtcacaaaagagcgtgtctatcccgccgaacttggtggatcatactgggtacgcaacatggtcagctcggttgagtttactgccgcagtgtcacaactcgcaaacctgagcgagtctatcaagtctcgccgacggccggttccaataaaatggaccgctttgattgaaatcggtccacacgccgttttaaaaggacctgtcactcaaatcctgcagtctgtcaacgcaaatatggcatcattgccgtactattcgttggtttcacggaaccagcatgctttgcgaacagcattggaagttgctggctcgctttggagcacaggacacacaatagaccttgctgcggtcaacagcagtgtcgataatacaagcccaaaaatgattccagatttgccttcttatccttggaatcaccaaacgtccttctggcacgagccattagagacagcgcagttgagacaacgtcagcatccacgtcatgatattctgggagctgccgtagattttcaaaacgctttagagccaagatggagaaacttcctgcgactctccgagaatccatggatggccgatcatgttgtcgccggatcgattgtgttcccagccgcgggaatgttggtgatggctactgaggcggcgcggcaactagctgatagcccagccaacatcaaaggaatagaattccaagaccttcattttatgcgaggggttgttatcccagacgaggaacgcggcttggaaactcttcttcaggtctcccctcatccagggatgccgggttggtatcagttcggaattttctcacttccctcggggggtgcttggattcaacacgcgaagggtgcattcattgcgcgattcgagaaccgaaccgacgatgagcataattcaaactggcaagcagcgttggaacgcatcaagaatacccaaacagtcgccaaaatggctgacgttggacaagcacgtgaatggttgtctaacacaggaggactcaccgtaggaccggccttccagacagtcactggcgtttctttttgcgattcagagtctcgtctctggctatccggggtcgtcacagacacaaaacaatcaatgcctttcgaaaaggagtcatccagttttatccatcccacaactcttgattgcctcttccagtctgccctgttgtcctgctctgatgcattatccagcaacaaagcaaatattccgatcggagtggacaatatctacatatccaatacgttccaaccccaaccgggggagcagtttgtcgtccacacagagaccaagtggcgagacgggaaatcacaatcccactgtatcgcgtcggaccccacctggtcacaaccctggatcacgtttgaaggtgttcatctcggtcgccttcccttcaactcaaattctctaaagcaagaggaagcatcttcggagagccgatattcgtcgattgtttgggatgaacacttggagtcgccgcttgtcactagccaaatcaatgacggaaacaagaagaaggccgtgcaagccagcagtctccaactaacagactggatcaagagattgtgctataccaacggggatgccagagcactcattactacttcggacacatcctcttggatcgcaagtctacaagagctgattccaagtgccggcaagcggccgtgcctaggaaggatgacagtcgcttcatgtggccacgaaaatcaagtggagggcgtcactcccacagagaacagcctcccgggaactcacctggcatccctcactacattaagcgaacttccatcttcgtcgctcgctcaggataaatatgatttggtcgtgatcgatgagcccaagtgggacgacaaaatcattcaagttatcctatcgtgtctgcccaccattcttgaacacggaggtttagcagcaatacgggtatcaggaaccaatcgagactcggcagcagagaagttgcaacgattggaaggccttgaaattcacagcacgaccaaagatcgcgagtttatcatcgcgcgcagaacaccagtctcgtggactacagactccgaaatctatattttgagtccagccgacaaatctaacacactagctgttttcgagcaccttgggaatatatttgccacccataacgttcgtctggtgcctgttgaattggaacaggtgggtacactagcaggaaagactgtgatttctttgcttgacttggcaagtccctggatatccggctggacggaaaatgatttggaacgtctccaggagttgatccgagttaaatacgttctttgggtgtccccttcctggagccaaggggctgttgagaatattggatctggtgccacaggcggccttttgcgaacacttcgcaatgagcagtggaacaccaccatcccacacctattggtcgatgtggaagatttggaagacaagttcggactagcttgtggcattctccaagtcatgcagctcacgacgcaggagagctcgcgccggccagacttggagtatcgtctggcaaacggtcggctgctagttccacgggtcattgagactccaacagtggatgaggccatgcacactcttatgaatggccccaggcctgtgatgtcagaccttacacttgatccgagacgccttgagttgaagttccaagatgcagacaacgcacgctgggaggaacaacaaccattcgaagagggacttcgcactgaccacattgaaatcatggttgaaatggccacaatcttcgatttacatggggatcaagggaagacaccagagacagctcttccaatgttcgaaattgttggaaaggtaactcttatcggatctggtgtgcacgacttggctgttggcgataaagtgttaaccctaacatcggcgagctcgggactcatgacagcaatgcgggtcttagaaagtgacactatcaggattcctgcaaatatggacccaaaaaatgcgatatcaactcctctagcgtacataaacgcttatcagattctcacccaagttggtcgcctcagttcaagttcctcggtgcttttggtcggctcaatcagtcaaactctccaggccatgatagattatgcccttgccatgaacatgcaagtcatcgtggcaactgattctgcagataccaccgagaaccttcgttctcgctacccagtattagcggatcgaattctcggcgttcacggtagcctagaaacaagtgtgtctaggctaaccaacggatgtggagttgacgccagcatttgcttccttggcggctatgcgggtcggaatgctgctaggtgtcttgtcccaggtggacagtacattaatctatctagcgagatgaagatgagtgctcttccagagagcttcattgacagtggctgcacattctcttcgccgcgactgcagaaaattttctcggagaaacccggcaatcttcatgcttcagtacggcatgtggttgacttcatgaagcagcataggatgttggaccgcgtggagtcctattctatgttccccgtttctgatctccaaggagctttgaaacattgcaaagtggccaatacccgagctatcgtggatcttcgggctcctggaagggtccctattgttctgccactgccaaatcttactggcttgccagcggaaggcacatatatactagcaggtggattaggaaacctcggccttgcgcttgccgataccttggtgcagtccggggcccgccatttggttttccttggaagatctggcggggcacaacctggtcaacagctagcccttgatctccttcgctctcatgggtgccgcatagatgtactgcgctgtgatatcgcccaacaggcagatattgaccacctgtcatacaagattcggagtaagaactggaccgttgcaggcgtgattcagtgtacaacagttctgaaggttatttaccctcatttcgttcgttttcattgacactagctaattccttcgtttattatcaggacgcaatgttcgagaacatgacttttgatgattggacccaatccacacagtccaagatccgcgggacactgaacttgcaccatctattttcggaatttgaaggcttgggtttcttcattgctttgtcttccgtggccagtgtcattggtaatatgggacaggctaactattctgcgggcaatggtttcattgacgctctcatggaatggcgacgcagtcacggtctcccaggtcattctatcaatattggcctcgttccagatgctagtggactcagcgacattgccgaagatcaagagcaacgccgccgccgatacaaacatcttgagggtacagaaatcatgacccatgagctccagaccttgctcagagtgatcattaacagcaagctttctcttccatctcaaataattgctggcatgaccgatcatctgtctcgcagcaatggctccatagcctgggttctcgatcgaaagtttgatcaccggctttgccttgctgccgatgacactgaggactctattcagactagcgccttactcaaggggtgtgactcccttgacaatgcaactgaggttgtccttaacgctctgagtgaatatctagcagatgcaatggctacaactgccgatgctatcgactcagatctaccattgtccgcgttgggaggtatgtcttttgatgatttttccccactgtgacttttgtcttgactaacactggcttctaactagttgattccctgaaagctacagccgttcaaaactgggtctctcgcgaactggggtcagaactatcctccttcgagtttcttggctcacaaccgaccaaggcgttagcgaggaaaattgcttctactagttcgtttgtctcggtgccgagctgaaggactatctgataatccatactcggtatggattagctcagaacaaccttttcttcacccatcatgtttcctgtttcaatctcggtttatcaaatctcatttttgggtagtttcaatagttcagtatatgtgttttttacttacaatacgtcgtttcgcgtacgaaatatacgaaatatatgaaattttccaatttgccaagacctgtagcccgtgccgcaggtgggtcccgtcaacaaactcacatgtcattcaatttatcttcatccttagagcagcctcgcatattttctggcggatagctccgctgtgcagattgcaggaccaatgcagcatgtaatggccggggtgagagtcgccattgcaatatagtgagggggatcaagcacgataaacagcttcatccacgagtggctccactgaagcccatagccttgacacatcgggaactggatcgacacttcgatctggatgatctggttgatcaacaaaaagaccgagttttcgatcccgtggagcgggctggggtgaaaatttctgctgtgcaatctcgcgaagacccctgccctgaacgatgacaaggaacgtggactccgttcggagtacggagtacccgcggacacgttaccctgttaagaaacggttgagctgtgcggtcttccttgctgctgcatggatggtataatatgtgcatgtcacttgggaagtaaggcgataaccccacttgcctatggagtgagtaactgtgtagcttttacaagttccaccgtccattccgattttttaagagttgatttcgctttcgatggtctcgcagatctcaaatctaggttctatgctagctcaagagaaaaacccacctcgattatgtatatacactatggttgtccggacggtatcgggatctaccaagccggcaggtcggcgtctgtccagttacatcggccgagatactccgaattcaatcaaaattcaacacgaccctaaatggaaaggcttcgaagcaactacattgaggggtagtttgtggagcttgggctggaccgtccacgttcccaccgagtctaagcaaggcaagccactatcgatatgctactccgtactttgtactccatacaacatagggcatctccacaccgtggagcctttcatggacccaagcaggtccatcaatatgtactctgcaaggccggaactgtatggagtgggattgcgcgggtgactttcctaggaaggtcggactaaaatttgtaaggcgtcttctagtcttgcacatgaaaaaaaggaataaatggaataaacactctgttgtcgtcttacaatctctctccccccttcctctctctttcatatccccatcctttcatcttcagctatgacggacgctgagaagaacgatctatgcatgccggtacccccggccaaggctattgtcatagatcatgacatggccattaccccagatcctgaaaagtttattggcaattactcttccaatgaggttccatccaatggccccgattctcccaatgtggttgacctggaggctcagcccacagagccccgacgaaagcggtttgcgcacttcagatatgtcatgtttactgtgtatcgccggctcttcactgtggtattttgcgcaaatctcgctgtatttctctacgtgatgatctctgatcggaagcttttggcacttgtgaatgcaacagctgtcaatttggtggcgtgcggtctcgctcgacacccgatgatggtcaacgccatctatagagtggtgtgctcgattcctcgaaaggcacctctatctttgcgccgcagatgcgctaaggcagctcactacggtggtgttcacagtggctgtgggactgcatctctggtgtggtacattggatttgttgccatggtgtcacagatctattggacaaattctcccatcagcacagtaacagatgccagtttctcggccgcaccgatcgccgtcgcctacgtcattcttgccctacttgttgtgatggtagtcgtggcatacccaaccttccgcaggagaatgcatgattacttcgagctcacccaccgattcacctcatggctgatcctggcccttttcgtggccttagtcatgttattcgcccatgacgtgggcaatgcagagcagcaaactcttggctataccctcgtcactcttcctgcattttggctgttaattgcggctgtcttcgccgtggcccatccatggctattattacggagggttccggtaaaggccgagcccctgtcttcgcatgctgtacgactatcttttgacttcaccccgatcaacttcgcaaaaggtgtccaagtctcaaagcatcctctacgcgactggcacagttttgccggatttccagaccccattccaaccggtgaaaagccatttgttaagggccacaggcataagagaagctggtcgatcgtggtgtcaaaagcaggtgattggacggcggataccattcgtgaaccgccaactcatctctggaaacgcggggcactgatgcgtggtgtcggatatggtctgcgtgtcttcgaccgcattatcatagtcaccacggggtccgggataggaccttgccttgggttcctaggcgacgaaaaccggcccttgatcaaggtcatttggcagacacgtaacccggtcaagacttatggccaggatgtcattgatctcgtccataagatgggccctgacccgattatcttcgataccagtcgtgatggccgtgttgacatgctccctatcgtgcgacagcaagtgaaggaattcaaagcggaggcagtgtttgttatcagcaaccccaaaatgactcaagatatcgtttacgagtttgaatcacaagggattccagcctacgggccaattttcgattcatgattcacgaaacacaatatatgttgccttttgattttattctaacccagttatgatatacgtttatgacctacatttcggtatttttcgagctatgagcctttcatccatttgtttatacgagtcaagtctagcaataaaagtatttcatataattatcaaaccctaaggaatctcatgtgatgccatgtcatcacatatttacatgtgcacagggacggagcgcctgattttgcagggtcggtgcgtgaatacgcctgagctctgctttatcttagactgacagaaatcaaaatacctgaattaccatgacaaggtcagttcaaacaatgaagctattcccgccatacaaatttccttatgtacccatttctcggcgttgaagctattcctaccgtgcaaatttccgtatacaacttctcggcgttgaagttattgtataaacttccatatacacccgttttatacggttggggtcggttattaacgcccagcaaatgatttgtatggattgtatggtctgtttacagtacatggtatagagcggtgtcgaaagcgacgaataattcaggcataagacctggaaaatcaggcattagacctttggccgctaactaactatgccccttcgcatacactatcccagtggcaacggatacagacttcactcctagtcctatccaaagcggcattgccactgcttgtcaggactatatatttcaggtgagatacgcccacaaccatggcgtgagccttccgctaacaaatcacagactgatacatgcgacagcattgtgtctgcagaaggctttttgacggaccatcaattcgttaaatggaatcccgtctttgggacgtattgttccggtctcgatagaatgggtcatagtataaattcaaagtagcataggtcgttttgccgatgaagggtctaagccttcgcactttctactcagtaatctgtcttaagatttaggcacaacaaatcaagtcaattcatctctttaaccctagaagcaggtagctctcctatcatatctcttatttcttccctacaaaccaaacgcaaggcatacaggatacaatgattggtcaccccacatagtatctgtaagctcccacctatcttgaccaggctttatttgtttgattctttggaaatagtaatccggaacgcaaagctgcagtcttgtccactctcgaccctttgatagtctgtcaaacggcttaaggaacgtcctcagcctctcgtcgtcaaagaagatctcgccaatttcgctcggtggcattttaagttgtaggcgtagtcgatgtacaccacggaaactctgctcgaacaatccgaagaacgcggcatatgttctcatccaatcatcctcgtctggcccagctttgcatatattaacagcaaacgagatttccatagacgtcataaaagaggcacatcgcggtgccaaaatccttgatatgagaaaaggagtatccatagcattgtccatcacaaagttatttgtcccatagagaacatctaaagcttcttcgtatctgcacgatgataagccattgtcctgatattatgagcatagtgacttacccgatttggcagcatctcaaccactccccgccaattgtcagcctttgcgactcagggtaccaatgtgaacaagggtcatcacaagggtcgttgatgaagtcatcacattccatacagacacgatgccaccagtgccagcgaggtcctcctcgtttcgactgcggccaagatggcaacggctccatccagaaatatcggatgtgcactcgccgaccacccataagctcaatgtataccaacctccttatctcagccggtagacgaaagaaggaacactgctgttgagagctgcgctttcgagcaccaagcttacataagccttgttctggctggatcggcagtttccatcgattgaatatatcgccattgatctcacaggtggaatctgagattcctattgcgtttggggaacaatctctcaatttgaacttggactcttttttcctgcgtttgaaaaatttggtaaaaagttttggtgccatgagggtggagggtggagtctaggagcgtaggagagtcggggtgttgattttatatgtgcttgggtgtgggtgaatgtcaccagtgcgtggtaaaacagaagtactaccgcaaaataggaggggaattaacccacaaagggttgggaccggtgtttttacctcacaaagaatcaaagatccttgcaagcggggaaccgccattccataggccgggatcttcatcttgctctttctcctttagttcacaggcttcctcttctagtcctgatttccaatggcaacgagatagccctcaattgtgacaataagattattgtcggaggcatgtttgggaccagtctgataaccagctcgattttgatggtgtcaaattgcctaaacattatggaaatgccaaacatcgagaccagagtgatactgagacgaaagaaacgaaaacgggcggcggcctcgactcgtcatcgtggaagagctcgtgttcgttttgaagaacaacatgaatacacaaagtgatgaattaggatcggacagaaagaggaccaatgctagatcaaagagatccccaggaagctcaaagaaaagccaatcgaaagatgaaacgacccgtaacctggaagagaaattgcaatggcttaagatgaacatttgctagtagcgctaccgcacctcaggcagaggggcatgttgacatgctactgatcttgagtccggtagggattaggaatactgaacgctgttagtagattggtttggatatacttctcggtgatgctgtactagcatgccatttgtatcacgaacatgtagttcggagaaaccgttgacgagtttcgtgcgacggacaagtttctaccttgtcatcataatagcccgaattgcgctatttccgacggctaagaaaaggttcatattatcaagtgattcctggattcgctctaaccccacccactcacagaagatagaagaagatcatgatctaagcacaggaaaatatcagtgtcttttcgcgagaagaatgataatcgtgccaggcgctaatcgaaactcaagggctataagaattcagtacatatttcgaatgagaggagcgtatgatatcttatttattcccactcgtacgtcaaattagacttcatcctaggtagtatccgagataactggggggaaagacatcactccactcgtcttcacatcttgtaatctaagacccctaaatcttcctcctttttgagggcattttccatcttcgcatttgttcgcccacgcgcttgtcctgattctctgctgtcgtccttgtggtcgttctctttctcctatttcttctttccctctggctcgtttcccgcaattttgttcagaaggagctgacaattttggacgaataggtggtgatgcaatggtgaagatgacagtaatgcaccagcgccacttcggtcgttgcaatgttgtaccctgtcaccctccatcaatccccgatcattttttatagttatttcgcgcttgagtttgacgtaagctaggggaacactagttagctaacttctggtcgctctgtcgcaggaatttgagtctggttcgatttgggattcgagactggcgtcatattgggtcctagccgctaggtactcaggtaatcgttgggttgaacgaggcggcgaggtcagggcgaggtcacatggtcgagtatcttatccattatcatcatgtgatcattggatgacaaatcacacatgaaagtgaattgtcgttctttgaagctacaatgttgaatcatatcatgtggtcgtacagtgtactgcatatgtccatcattgcatatttctattattgaatgtggaccattccactcatatcgcaggtacggcagtctcccaccgccagtgcgccatatcagatgttgcctgtagggtttgtttttaggcacccatgaggctagccagggcttttcccaatcaaaacaagatcattgcgtacgagatttttggcaacgaatgaagtgcttttccaggcattagcggggtacaccaggtgggaggcaaaacccgcccagtgggtgtatataaattggtagatgtgcccttttaaatgtccatgattctacaaataacatgcattcaagtcgactaagaaaacgccatgcagagaggttggagaccatccaggaccttgtcccatctctacctgcagccccattgacatccccgctatttaccgtcttccccgccgagatccgcaatcgcgtttatacgttcgcccttgagtccgaggatgttctcacagacgacagttctcactccctctacaagcaaaatgctttctactaccgacccggttataagcagcccaagcgcatccaaactgccctcctccagacatgtcagcaaatctacgctgaggcgtccctcctcccaccggctgtaaatgagcatactttctggttttatcggtctccgccgcatgtcaatgatgcgtcgtcaccgctaaattactttcgcaagatgaccccaaaacagcgggctcaggtgcagcatctgcacctgttcacccaacagtatttcctagaggacaaccattggtctcagatatgggaggggttgaagataggcgacgacgggcgcagtttgcgaggggagtgccggatcgccccgaagaagatgaccatcacctttcgccacacggactggtggtactgggagaacaatgaccccctgggcatcgatccgttccggcccggaagaacacatgcaaccgatatgggcaaggctgtttccccgcacgacgccgctcgatcatgggggaaccaattcagctctatcccctgccttgaagaattggtgatcgagttcgagaccatcatgcggaagagggaccagctagatgacatcatacaacaagctctcgagtggaaatttcccatggaggctgacaagggcttatatctggtggctgaccccaagtcgaagagcgcatatacttgggctggggcgaaagaggcggagctgaaaagacagagacctgtacgaccggtcgatgctgaggctgagtcagaatctgcccacgaacaggagccggttcctgcagctccggctttggtgccgtatgatcctcagtccgattcaggcacaaatagcgacattaatcttggaaaccatcccccatctgacacagatacggagaagttctatgtcgtcttcttgacttggaggaaacagcgtgtcctggagtgagctactcatcccaacctcagtatcacgagggatctagattttgttcctacaattctgacacagactacgatcccacgaggaatgtaaaattgacacattgttagatggttcatataaattttcatactttcgcttcatatataaggaataacatcctagtgtcgtatatagtaaagtacttctagcttgctgcacgaagtacccaacctttcaaggttagaaggtacaaatgaagaggattgttgctcgcatccccccctgcctgaattttcagtggtgccataaagcaaacatcatgtcccagcagtaataacgacgcgaatttgtatcacagtcgataaaagaaggtaataaagaaatatgtgaaaatacaaagtgtgaaaatagacgacacagctagcacctaagggtaagtaaaggtgacatacaaaatttgacgtatgtagaacacaaggggttctaatatgcgccccagagggtggtctgatgtttgcttcatcagagataatccgggggaggaactggaaggatgaacttcggaaaatcgcgaggagagaaaaggagatttgaaagaatcggagtagaaatgtttgcccgtagtcatctgatggcgcgtttagaaagccaagactggatttcaacagctttatcctaacgaaaggacgtagagtagtagggatggcgcgattattgaaggcaagaaagatgtccttatatatgaactagatagaatagatacgaaaaaatcaatttagcaaacaatcaaatcctggaatggacctgattcaccaactgcgcaacagtgtcgactatctcatccagcaaagacacagcaaagtccgaccacgactcaacagtgacaacttcgatgcacaaagtatcccccttggggaatgcttgcaccttgatttcccgcaacggctcgaaatgcgggtagatggtctgcatacgactactagccgccatgaaagacaaaccctcaacatgctcaacatcctggtgcacgaccgaatcaaaccaatcaaccgtctccggccagtcggtacagtctttgataatttccttgagaccgattccttcgaattgcgcgctctcgagatgttgacgctgtacaaaccgcaaaagatccatggcactccatccatctgcgaacttcacccgcactggcacatactgccatgatggtccaacaaccgcgtcagcgttggggaggtcaatgttgcggccactcaccacctcgccaaaagtgacatcatcaagggagagtcgtcgcgcgaggcacagcgcccaagccgctgtcggtagggttgcgactgtgatttcccgtggtcgcgcggctatattgacatccttggagatggcaaaatgagctgcagacactacagggatatcgggttggattcgtgtcatagacgatccttgaaggagatcacgccagtacggaatgctgactggcagattagtgcgagtcacgtggccgacatacgacgagaatggcagactcttcggcactggtcgtccctcgtacaatgccgatagctgctgcagcaaaattggaagacagatctcatcatactgggcatgagagatgcgcatgatcaggctgctgggcccgtcaacatgccgaacgaagagaaatttcaaaaatggtgatccgaggggaatacgtgactgaacatccacatcgcaaagtttctggctgaacgcctccacgtcactttcaatctcatattcaattatctggcagggaaggtcatctacaaccactcccaatgagacaccctcatgctccacgaacacagttcgaaggatctcattccgggagacaagttcctggcagctttggaacagttgagtgcgatccacctcggtatccatgtagaaaagttcgtatcgcatggaataacgaggcagctggacagttccctggacggcaatttcctggagcgggcgacttggataggcatccacaatcttccactcaggctgagcaagcaacggggtcatcttgttgatgaaggcatccacatcggtcagatcgagtgagctgaatggcgcgtattcccgcgatgtagcaactgatggttgagcctccacggcgtgttcggccatgtcaaagagagatcggtgatcgaagattatggttacagttagctcaaggccatccatacgagcctccgagaccagcttcatagcacgaattgagtcacctcccaaatcgaagaagctgtcatccaaaaggatatcctcacagggaatgtccaagacctggctccagacccgttggagcttttgctgcgtgaccgtcgtgatggctgcacgaccactaaggtttctgtttcggggtttgatttgaccaacttgcgcgtcctttgcgcgaataataatcacagagccgtcactggtgtatttccccagctggtttgtcgtgtacagctttgttggttgcttgaaccaggatggattggcaactgggttgccggaagccagttcatcttcgctttcaacgaggagctcacccaccccaccaggtggaacaagagactcataatcatttggattaacgatccaagttgatgtgacaagtgagtaaagatcccccgcaggaaggcttgccgggccaatcttggcgagacggcattgttctggaacatccgtctcaattgtcgaatcgtatatgtgctggattcgctgagtcggatcctcgaggatctgctgcaccagccgatcaaactgttcgagcgcttgctccatctgccggacatcaatggttttcgagtcgaagctggccatgacaaggaacccttttggatcaacggtgaagacaagcataagggcgtatgaattgaatttcaacgcttcccgggcggcctctgcctcgcttgttggaacaaatgcggtggctggttcttcttccgaagaggatacgctctcctcgaccgttgggtgaattacaatgcctgtgcgcaattcacacgcctctcgagcatcggcgttcaaacgtcgaatgtgctgcagacccatgtgttcgtgaggaatgcgatctaccgtttgatcatgaatctgctgaaggtagcttgatgctcgagccttgcgatcgatacagactcgaaccgggacagtggtgatcattgggccctcgatctcctctactgctgccacgggagctgtgcgaccggtcatagtctctccaaacacgacgtcatcggaggatgtgtaatacgcggctaaaagaccccaagcacctcgaataagggttgcaatgctcgttgtagagctcgacgaagcccgaggcagcttgacgtaatgttccaggagagaatcagcacgcgcttgatacccagtatatggaatgagagggaattgtaacgcggtagcgccctccagttgagttgcccaatatgtctctgtggaggctcgatcagtgtcattaagccatctgatgaagttcttgaacggtgctgggctgccgatactctcaccacgataggcgcgattcactcggtcaactatcaatggcattgaccacccatcataaagggcatggtgaatgctcaggacgatgtagattttgccggtcgcttcatcctccacaatggcgaaacgagcaagctcagttcccagagacatccccttgagtgtatcgctactgagatactccgccaagttggaactactgagccatggagtgttggtccgtacgacgatctgcatcaaaccccggcgtgggacttggacaatccttgttcgtaggatcgcggagtctaccgagacactctcgaaagcagactgtagtcgtgtggcggtttgaacatcctggagctcaatgaccctctgcgcgacataggcatctgtatacttcgcggagagggccatgagggcttcttggagaggtgtgcatggatacacatcagccacctcttcaggatgcaagttgcacagcgaagccacttcaacccgcgcagcgtcggcttcccagtgtgctggaagtagcgaaaatgggggaacctccactggagctttgttctcaacctgtttcattttgagggctagatgctcaagaataggcgattggaaaatatcagtgacttgaatagcaagaagctgctctcgcgcagcagctaccaacttcatggctttcaatgagtcacctccgaggctgaaaaagtggtcattgaccccgatctctgcctcatcaccaaatatcttcaaccataggccgtggagcttgcgctccatctctgtccggggtgttaatttgacaactgtggacaatctaagctctgcaatatgtcgccttgttaggccattgccgagagcacgcagctgcttccggtctgtcttgagcgacactagaagtggcatgtgattgagtggtatatatgcggtggggatcatataccggggcaggtttgaggcgagaacatcgtcaataccagcgatcaacttttggaatgaacttgaaaatgagatgatctcgctgattgtgcccgtcttatcactcttttcctctgccacaaagacaatcaatgtggcatctgctttcttccccccaggaaatatcacttccgctgcgacacttgctccagcagggaagtaatttcggacgtggtgctcgatttcgcccagttccacgcgctggccgcgcagtttcacctgttgatcggcacggccgatgaaaacaacactgcctgaggcatcaggatcatatcttaccaggtcaccggtcttgtagagacgacccttgcgacctggcacatctcccccaccctcaagcaaccatgccgggtcctcgatgaaaacctcggcggttttctctggattattgaggtatccatcaccgaccacggggccttcaacaagcagctctcccacggcgccgatgggcatcaatcggtcgtggttggatggatctaccacccatgttgtgcctccgactccctgtccgatactggtgtacgatcgaccgggagggatgtcgttgttgattgtgcaaccaacagtgcactccgatggtccatatgcgatcacgaccttcgtcttctggccccattcggccgcatcgctagcagagattgactcaccaccaaggccaatgacctccagcgatggcatgatatcaggagccaagacacgtgcaaccgatggtgtcatgtgcgccatgtttacattcaatccgcgaatggcgccactgagatcgttgactcgttggtcttctgagggcacacaaatgcaacctccgttggccaaagtgcacagcatgcagtcaacactgacatcgaatgcatacgaggggaagtcgagcactcgcgagtgctctttgtatcccacagctgcggcgcgaggtactgcaccactagtgtagttggagtgcgaaatgactacacccttaggcttgccagtactaccggaggtgaactggatgtaaagggttgacgacgctgggaccacaggtaggtctaccgagagtgatttcaatttgtcttcgtcgaccagcgggccaacaataacttgctttcctcctgggacaatgcgcgatcctagttccgcctgcaactccgaggtcaagataaactcagcctcaacctcgctggcgatagtgctcagtcgtccctcgggctgactaggatccatgagaaccaatgcaccgccagccttcatcactgcgagcacaccgacaattgtccacatagacttttcaaagcagagtggaacagccttgccaatttgcagtccgagatcaactagatatctggctaggtttgttgagcgctcttctagctgtccataggtcatctctccatcccaagatacgactgcaggacgatcgatttgactttgagctttttcactgattatatcttgaatgcaatgatcgatagttgggggcattagcccgttccacttccataactgtgacagctctcgccgtccaatctgaatggccttagccacgggcttatcgaggtcactggcgatagaaataatgaggtcggcgaagatatcaggtaggacggcttcgacaggctgcgtggctgtcggggaccgcggagtcccgcgaacatacacaacaccatccgagagctttgcttccagggcaaatgtccactaatcaagttaataaccgatcacagctataattttagatctacttactttactctcaagggaggcatttcgacataagagtgtatccgaaaattctccgtcgaatttgccccgcctccgaattgcatccaaggcggttctcagcgagctgtcttccccctcaatcacatcggagatgagacctccttggagactgccctcgcttacccaagaaaagcctccatcttcactgctcactgttccccgaaagagaaggaggatccaagccagcgcgaaaagttcctcgtgtcttatatccggcagcattggtagggccatacagtcggaccagccaacatcctgtggcttcaattctttgctgacccaaggggtcgcactgggctcgatgtattcacccatattcttggaaaatagcaatatcaagaaagtgtctctagggcttctccggggactacgaagcaacgatctgattaaattatctgatgctgatcttcagtaacggacttggcatcctgcgagaaaccccgtgcctgcagaacagggccacaacgggtagaaacaatccgagcaggtgccgaacggtcattgccaatattgcaatggagcccgttagagtggggatacatatgtatctgagcccatgtatggttataacgcaaattactctccatactatactataccataccataccatacactaacgccaagggtccacgctaagcactgccaccctggacccaccttggcactaaaaaccttactgcagagccatggcagtcataattcgaaactttcgatattttctttggtggaagattgtcatcaatatgacgatcatcctcttcaatcttaccattgtcgcaagtttccgcctcgatcaattacgttgattgcgacatcggatatccgtcgattcatcacattggtgatttctgaaccagctttggaaattctcgttttaaccatgtatgggaggctagatcgacttccccctgttgttactagtctgcgccaagtagcaatactgagatacacggatggtcctttgtagcagccaaggtctctggtggacatagacaaggatgatcaattccctacatcgcatgaagaaattccccgagccggaataaaccgaggatgaggtggtcaatgccgacattgtatatctgattacttattccctcgtgcatctcctctgagttagtagcattgtcacgtcatgtctttgagttctctccccctggtgcggctaccggagccatacaagacaacctatgaattgcatgtcgtatccaccgagaaaaacctccgcaagtttcagctactgagatctcctcgcggggatgaaggcataccacccccaaagccattggaccatgcgtcgttgagattcacagatctgtcccagcccgattcttctttcacaccagacgaaggaaacaactcaccctgggctcgcgcacagagaagtccagttacctatatctcatgggaaagctcggaggcaccaacagtgggacagatctggaatttggtctatgctatcgagaccttgcacagcgagttcgagatattccgtgccgtactgtctggcggtgggagtgatatacttgcacacgagctacaggctgtgggcttggccattgcgcaccccgaaccatctgctgcgccagggaagcccatcccagtcaccactagccatctcggacagctggtcttttcccgcagtagcttctggcaaggagctggctcacccttcggtacccgcccagcctgggttgctgacccgggcatttacagctatatgagaaagccgttgagcaactacccttcccgaccccgccaacacacagtcaccactggtttccccgagcgtcgagtacatgcccttcacccggtacggccaccaaagccatcccccggctctcgcatctacagccgctacattccacacttgaacgaatttttctcggtctatgcactagactacacaaacgacgaacatctggggcttttcaataagtggcagaatgaccctcgagtggctcaggggtggaacgagactggtactttggaccaacatcgtgaatacttgcgcaaaatccaggatgatccccatcagatcgctgtgctggccaagttcaacgatactttcttttcctatcatgagatatactggacaaaggtatggtttctattttctccagcaacccgactatggctaatttaaattacaggaggaccatcttggtgcgtattacgatgctggtgactgggacagaggccgccattcgctagtcggtgatgagcgtttccggggcccgcaccgcacgattgcgtggtggtctggattgatgcattacatcttcctggatgatccacgtacggagtttgtgactggagagccaaaatactcgaatctcgcccctctgacctacgaccatgctacgggcatgaacctagccaagctggtcgatctgccacataaacggtcggcgctcatccttggtagcagggaaaaattcttccatgtagcacccctacgatttgacgggtctgatactctcgatcgcaatccattccgctcattgaagttgtgatagtcggaaaatgtgaaataagatgtgattgtattatgcatattatggacttgtgagcaagacttcagacgtataccgaggcagattcgtacgtaagcctttaatccacaattacctaggtagcaatgaagccaagcagatcctcttcacgacagtaaacaaagcgtaatctaatcagattcgggatgtccccgggacccctgggacccgatattttgagtttgacagttgtaattttccccatttaccctaaaaagtaaagttcgcaacagcagccaagcaggtctccggggttaacattccggaatagaacacatatgtattgggatcggcgtatcctaagaaattggcaaaccttcccaagagaagccttcgctcggacgaagggcatacggcattcttggcccagccccgagcccaccccaggcccacccccaagaacctccaagcccaaaacaaaaaaaacaacaaatacatactcttggctcttgccggttttatttactagtcgatctgataaagggttcaatattacgtattgtccgacgtcggcttttcactgtaaattcttggtaatcgagtcattcggcgagtggagtgcatggctttctgccattgcacttactttcgggataaaatagcaaatgatcttcctaatgttctcatctattcacgccgatagatagattttttattatggctgccgaagatgcaccagcgcagaagcgcagcgtatgtcacccctgaatgcttaggtttactcaagctaatatcgtcacagtggagggagaaagctgtcttctttcgcctgtttgtctatggcgagcctagcagatcagatattgccctccttatcctgggccttgtctccgcaattgcctccggaattccttttccgatcatgtcgattgtgttcggtcaattggtggatgagatgaactcgacgacctgcaacgccaacgacaccaatggcgactcataccaagatagtattaacaagaaagtcttgttgattgtctacatcggcattgcctacctctttttgatttatatctatgtgtttagctggaatctgactggtgagcgactggctcagcgcctgcgtgagaaatatttcaaagcccttctccgccaagatgtggccttcttcgacaatctcccagctggagaggcatcctcgagaattactggtgatattaccaccgtgcagcagggaacatctgaaaaggtcggaatcgtgatcaacagtcttgcctttttcgtcaccgcgtacatcgtggctttcatcaaggatcgcaagttggctggaatgttggtctccttgactccggcctacttgatcatgtctctgttgggaggatattttgtgcaaaagtactttggtcgcgcactggaaagcatgaccaaggcatcctcggtagcactggaggcattttccaacacaatggttgttcatgctttctcggccaacgcgcggctcgaggaaaagtttatcgagtttttgaacccgtccaggattgctggaattcgcaaatcaattgccgcggccacccaggctggtttgctttactttattgctttctcggccaatgcactcgccttttggcaggggtcaaggcagattgcggactcagtagagtccgatgctggtggcatcaccgtcggggcaacatatactgtgatttttattctagtcgatggtaagcatctctatccgtgaatttggttgaccacttgctgactacttctatctatcagcgtccttgatcctcagcacagtcgcacctttcatccaaagcttcgacgctgcttcggttgccttttcaaaattgaaggctgatatagagcactcatccacaattgatggcacttcgaaggatggagaagtattggcggaggtcaagggccatattgagctgcgcgacgtttcattccgtttcccttctcgtccagataaaccagtccttcagaatctatccctttcctgccctgccggtcaacaaactgccatcgtcggcttgtctgggagtggaaaatccactgttgccgggctagcaacaagattctacgatgcgaccgaaggaaccgttttgttggatgggcatgatgtcaaagacctgaatgtacgtgcattgaggagcaatattagccttgtccagcaagagccttgtcttctcgatcgatcaatttttgagaacattgccatgggcctgatcaattcccctgcacacactcatcttcaaccgattctgactggcactgcgctggttgaaattgctgccgctgcaagggagggacaatctcttgcttccgcctctcttgaacacggtgatcaggcacaagaggtggtaagactggtcgaagatgcttccaaattggctgatgccaacaagttcattgaaaagctccaagaaggttacggtacttcagttggttccagtgggaacctgatcagtggcggacagaagcaacgtatctctttggcccgggccttggtgaaagatccccgaattctcatcctcgatgaagccacagcatctttggactcggcgacagaaatgcgcatacagagagccttggagaccgtggccgtgggccgaactgtcattaccattgcgcatcgtctatctaccatcaggaacgcggacaatatcatcgtcatgagacaaggaaagcttgttgaacaaggcactcatacggagctacaggcagccaatggtgcttacgcagagctgattcgccttcagaatctcaatgttgacaacgctcatgagggaacatccacccgatcggtgtcgcctgtcaatcaaatcacagaaaaggttgaaccctgtctttccgtggccgatgaaatccccgataaagatgagacgatcgatacttctattgcccaagactccaagtccaaagaaaccggcggtgttgtcgactcacacaggtcattttcctcaacagtcagctccctgggctctatgttccgaccgtatgcacttgttctgttccctgccgtgaccggcgccattgtcattggcggcacatactgtgcttcggcagtgatctttggtaatgtcgtgagtaagctgagtggctgtgaggagcctcagaatatccgcgatgctggagagttctatgggcttatgttctttgtcctcgctatcattgaattctttgcaaatttggtcagctggtctctcttcggttggatggcagagaatgtgatctacaaagtgcgagttctttcactgcgatctatcctcgagcaagacctccaatggcacgaatccaatgaccgcaacccatcgttgctactttccttgataaccaaggacagcaatgctcttgcaggcctgactggctccgttgtgtgtacaatgttgtctattctcatcaacctattcgccgctatcattatgtcgcacattatcgcgtggcgaattgcccttgtttgtcttgctgtggtacctttgctcctggccgctggctggatgcgagttacctcactagcacagtttgaagagcgccacttggaggcttttgctcggtcggtgggaattacagtggaggctgtcaactccatcaagaccgtcatgtctctctctgtggaagaagagattatgggaacataccgtcgttcgttggcggcacccatgaaagagataacccgccaaagtgcctgggccaatatttggcttgccatcgggtacggtctcagcaacttcctatacggcctcgcttattggtggggagcgaaaaacatcattgcaggatattattctcagacgcagttcttcattgtccagctagcgctgcttgtcagttcacagctgtggggacagatgtttgccctagcccccgatgtatcgcgagccttccaggccacccgccgattgttaaatctgcttgaccttggaaccacgaagaaactgtcagcccctatccgaacactgcctagcaagcttttgcagtctacgagtgacgtcgagtccacggcagtcacccgcgagaaactcgaagacactcgcaatggcatcagcgtctccttcaaacaggtccgttttgcgtatcccgcacggccagatgcccttgtgcttcatggtttggatctgaatgtcaagccaggtcagtttgccgctttggtcggacctagtggtgctggaaaatccaccatcatttcacttgtcgagcgcctctattcccccgcatcaggcaccattcatgttgatggccgagacgttgcctacggtgacatttccttccgtgactccattgcatatgtaccacaacaaagtattttgttcgaaggaactattcgcttcaaccttgctcttggcgcacgacctggccacgaagttacgcaagaggagttggacgaagcttgtcaattagccaatatttacgacgtcattacgcagcttccggacggatacgatacacactgcgggccaaatggtgatcgcctgtccggaggtcaaaagcagcggctggctattgcacgggcgctgatccgaaagccgaagctgttgctcctagacgagtcgaccagtgctttggacgctgagtctgagcgattgcttcaggatggattggagaaggcaaccaagaacatgacagtgatagcgattgctcatcgtttgtacacgatccgtaaggcggacgtgattttcttgattgaggatgggcgttgtgttgagcaaggcactcacgcccagctggtcgagaggagcgagacctatagggtcaatgccttgaaccagacagtggatggtgaatagaaaaaggtagatagctggggttctcttctagttttgttgatatagatctatattgtttaatctcattctcttatgatagacaatcaatcccctactacatgtgaagataaaagagaaacgtacttgctgtccttgccgtacttcactttcgctccttccccgagctacgtcgagaataagcgagagagcgaccattcgcatagttcacaagaaggacaggtacaagacgacagggcacatagatagctttcctttttcctcactctcttgtacttgtatttagattgaaatgcactcttttcttctgaatctatctggcaggtaacactatatatcgtttcgtgacttttctatcggcttgaatcattactcggtagcttctcccaaacgcatccatttccaacaaactgcttttattagctcaataaatctgggtgggagctcctcaacttactttcatatcctagatcgtcattgaagaacatgttacggacctcgtcgcccgaggacagtcccatggccgggaagtgcccaacggcggtttttccaagggccaaagccatcatcggggctacctcaaccaactccacgaatttgggttctgtattgtaccgctccgctaacatctgctggtggatattgacagctgcgaagtgcgcctggtgcatcgccgctccaccgcgcttaataccagaccaggatgcaatatcaccggcagcgtagtgatatttcttgttggggacatctgcggaaaactgaagaccgggcgtgatttggacatatccttcaggatcgcaggcatccttgggaaggtatgacgatgttggcgtgaaccgtgacacggcattgattacatggtcggcaacgagctctcgaccatctgagagcttgagcgtgtatttcgccggagaagattcgctaccgagaactgtatcctggacgcgtgctcccaaaaccacttcgaccttggactcttttagcatttcaagtgcctttgctttgaaatcatcagggaggtcctcagaggagagtagctgttgccgagagtgaacgagtgtcacctttgcctgaggttggagcatcttgatctcggcggcgatctcaataccgacagcccctgcgacagacaaatcaattagtattactcagatgaaagaagatggcgccacgtaccgcctccgataataaccacgccttccgcagctttctcgatagtctgcacagagtctgcagtttcggcaagatatgcctcccgagtcaaagacttaggcgcactaggccactctcttcgcaagcccgaacacgcaatcatgtagtcgtatttttcttcgacaatcttgtgcccgtcatttgcagtattttgatggatacgcgcaattcgggacttgcagtctatcgagtctactcgtccttggatgtgattgatatcgggggactggagagcggggatatcctcgaactttttccagaatgtgctagcatcagcgttggaagctatggccaagggcagtccgatcagatggtctaaaataattatgtcagtgacgtgctttcagatcccaacacgatacacatacaatatccatcgcgctcatccacaatggttacttgcacaggaatcgtgttccccgggccctggtcattctcatccaggctgaatcggcatttccgtccatgacaaaggtcaacgaggttcagagtcgcggccaaaccggaataagaccctccgacaatgagaaccttgaaggggggctgttcctcgagactaggcatagcggcgatcagtataatgagctttggggtaatagaggagaagtttcggggatgggggaaagaaaagaagtcaaactagccggcaaatcgacccgagcaactgatcggaccaacatgactaggtcaaatgtctcaatacccgaccccggaggaaatacagccccaattacgcatgtatgtaactttaaatttcagtgcaaccttgtcttatcagatccgacttcgggagtcttggcaccaggaaacttataatttgttgaatacagatgcacttgatactactccgtgtacactgctacattcttcgactatttccgattcctcgataaaccatacattcttttctgtattcaatatgggcttcgttgttgtccccgccactcttcccgatatccgggccatctacgatgtctggtttgcggctttcaaaggccaattgatcctagacctcatctatccaggaactgatctcaacgatgaggctttccgcaaggtccacacagaagggactctggaatattggaaaggattgagcatggagcacacttttcaatgcattgacaccgacaccggtaaaatcgccggcatggcaacctggcaagtctactggcgggaaaggaccgctgaagagcgtcagaagccctggattggatggttggagggtgaccaacgagagcgtgccgaagggtttttgggacagctttgggagaagagggagaagtggattggccccaagaggcatgtgtgtgagtggtcaccgatccttatattgaaaaaacattgaaaatgaccctatgctgaccggagatagactgccacaccgttgcagtgcatcccgaataccaaggtaaaggtgtcggggcacggcttatgcaatggggaatgagcgttgcggagcagctgaatgtaccgatttaccttgagtcgacggtggagggagtcccgttgtatcaaaaacttggcttccaaactctctcggaggacatcctattcaagcctgaaattaccagggtcgacaaggaggttcgagcaccactcatggtgaaaatgcccatagctgcgggaaacatgacatttgaggaatgggtggaggacaagagtccctctgtgaaagctacataggtatctacatattcttttagatgttcaatgcacatagatgccacatgccgtattgcatgccaagatcttatttttcgacgccaagagaacctctcatgtggtgagaacactgtagacataccttccttagcctacggtgtgtaaaatgtgtctcggaacctaagtttcccgaatgagcgagaactccgaccagttccggagtaatcagatggtaaaactggccatcccttttccattagtcttggtaaggagcctagaaattactcggaggcccaagcggagacggacagccaaagccaagacttggcgtattcttggttattaaatgtccacgggtgtggaaaccttttatcaatctaattattattgagtcaaaaatgacaacaggggtactcttttgtgcggccgtcattccctgacttcaactgaaatttatcgtatttattcaatagcagtttttacatccatgtgggctagaacattactgtggagataataaagggtctgtacatcttcaagggattaagggattggacctccaaggaacatgttatgaagtcgtaacatacggagtactccgtactataagcgaactccaccaggaccacctcggcaagtgtcgatcagtccctggcgtggcgtggcgtggcgtgcattaacttttactgataccgcgaaatacctgtgataccaagcggacccctgtatcgtacggaaatatcaatgtggggccgctgatcttatctgatcaaggattatcagatggcccacaaacccgtctgtatacccatggacctagactaccaacctgaattcttcagttctctaggcgatcttaataacgtgtcagcagacattaaatcactcatatcagagagtgaatgggctggccgatatcggctggacgcggggatttctgaataattctagtgatatatttatttgagtttgaaaagaagcagcatttccctctttcaggaaagttgactttgccatgcgtctttcttccgcctttgccgccctttgcgggctccaagcgacccttgtcgttgctgagaacaccacttggccctggcgaaccttcaagtccagccctcaccagcctccaagtctccaaatctccaaatccggacctaccagccccggatacctcttctttgaccaatcatggaacgcacatcagtacggtgtgttcataatgtcggacagtaatgagcttgtttggcaaagcccgcccggtgatctacaggatttccgagtacagaagctggatgggaagcctgtcctgacgtacttcaacggccttggagtcccagagccgttcggatggggatacggcattgttcaagtcttggacgagtcctatcgaagtatctataatgtctctgtgacaaacgacaactacaaggccttgggcagcattgacagctcctctttcgtatcatggattgacatccacgagaatacaatgacgtctgatgggacaatgctggtcaccggctacaatgtcacccaggctgatctcagttctgtgggaggccccaagaacggttggatcgctgactcgctcttctacgagatcgacgtcaagaccaatgagatacttttccgttggagtgccctcgaccatatcaatcagattcccttggaacatgtacagccattctaccctgttcgagactggggacacaacagcagctctccctacggctactttcatatcaactcagtggacaagtttcaagatggaacgtacctcatttcttctcgttactactgttcgctgttcaagatcgcgaaggatggatcggtggactggacgctacaggtaaataccgtctccttcaagtgtgttaaattgtggcccatatactaataacatacgatagggtcaaggtggcggcgactttgaactcaagggaatcaaattcagttaccaacacgacgcccgcattcgtgacgagactgaaaatgcactcattcttagcatttttgacaattccaactccgatgtccagaacgggactgatcacaccgaaggcatatttatgagcgtcaatctggccactcgcgaggtctcccctgtccgaactctgcacgatcaacgcgatgagatcttttcgacttctcaaggaaacacacaattactacctgcaaatcacgttgtgatgggctacggatcaaatcctaaaatcaaggagtataatgccaacggttcttgtatcatgactgcccagtttggattcgatggtgtcgtttcaagttaccgagcctatcgctccccctgggtcggcgttcccgcaactccccccgatgtattctcttgtattgagaaaagcagcaacaagaccaatgtttatatgagttggaacggagccactgagcatcaacagtggaaggtttttgggggcgctactcgttcagaactgagtccggtcgcgatggcacgaaagacaggatttgagaccgtggcgagcatcaaaggatatcttggatatgtccgagtggaagctcacggcctggggatccagaaaggcgtttccaaaattgtacccgtgcagagtcagtgttaggtttcgcatatgattgcaatatcttgtaattttagtgataatagacaatgaaaacgtggactataccagtctttctagagtaccattttcagcttttatgagagagcaaacttctacatacttgaatagtgcttactttaggtgtgatcctactcgattacaagctcctaatcatttagagattgtcttgagcgagccaaaatttagaaaatgatgatgtactcttcttcggttctagatggttggtattaatcgcatgacacccaactaattagaaacattactacctaccactgcactaacttcaatctgacccccataaacttcatctgccgacttcacacttctctatcaacagcatatcaacttaaataacgcggcccctgacctgcttaagatcctttatcttgatatctctccacatcccagcacatccccaggcaactaccagcagacaaacactggtcaccagcatatatcgctgcgcatctccataggcgtgagcaatagcattccgagttgagcttccccacggatacgacagctgggccgtgatatcggaataaaccgttgccatattcacatctgctggcaggtatttggtcagcgccttcgggaattgactggtccagatagcagcagacacagttgatccaattgcactgccgatgctaccgaatagatccagcatagcaaggacaacagcaatgtgctggtgatcggaaggcgccatcatagcaagctcgccgcaaataacagtggttccaccagccacggcaacaaagatttgcgtcatgcaaatatacccaatattcgtatcgggctgacggaatttgatcatcagcccaacgcctagtatcataagcgggaaggagaagtaaacggccagccatttgaagcgaccagtccagcggatcaggaagccgacgaggagacaaaagagacaggaaccgactctgtaaatggctgagacataactggcttctgtgacatccagaccccaaacaacctggagcattgatgtgaaataactaccccagaccattgagttgaaaaactcaaagacgaacattaaccctccgaagaagacggttcggtccatcagtaaattgaatgggatgaaggtcactggagcccagaatcgctcgtagacggcgaacaagatgagcaaaaggcctccaaaaacgatcatgcagataatcattgctgaccgccattgatccttttggtaagaccagaggctgaatggaagaaggaacaaggccattcctcctgccagaagaatgattccaatcaagtcgatctctatgcagtatttcttcaatgaagcaaaggtgacatggccatggctggacgcgagcaagcccatcttcttagcctttcgctgattccagaagaacagaagacacagaggtgccaccacaaccggaacgataatagtgaagattccgaatccccatcgccagccagggcctccgaggacactctgggagattggacctccgatccaagtggtgatgacgtatggcgaagttgcaaaagataacatgagggctcgattcttcaatgcagaggtgtctgagatgaaaactgtcaaacaatagctgactccttgggatctagaagttgttgcagttagctaggctgttcgaaagacagatatttcccaaatggttatcataattcataccccacggatgagaaaacctgcgcagctgcgtatgtctcaacgttgttgcatgccgccatcatgatgaatcccacaacccaaatgatcagcatcaaactcataccctgaggtcgaccccacgagtccagaatctttgccaatggaattttactcaagcctccaatgatattggccatgatactcgtggcagccgtcaaagaatggagcctaaaggcactggtcacgtatgggttcagagaacggatgacgacctcctggatggaggtaacaaagtagataaaccatatgcttcacacgtaaaagtcagtgatttgaatgaatataaacattggatcatggagagattctcacatcacatatgccaagatcatatgagacttagtccacacggccgcagtggcctgaacacctttcacaccagcctgagcctcttgatcaagagagtcctggtcggagctgccatgatcctcagcggtatctttcggtgtgtgggctgtctctggcgctttctcggagggatagaggacttcagagcccatttcgcgagcgatctccgtttctttcgatgccatggcgaaagactctacggttcgaatactaaactggctaaaaatcgccgatcagtgggatatatatataccctggcatatcagacatgcattatccgatatcggtaataggaaagaatctgcaccaatgagtgtgttgactcaaggaaagtgtccggtaagtaataatttccattgccactagggagattagttgaggccgagccccttggcgcgcctaagcgtcgagaagatgggtccataaccatccctgtaggcttcctcggcccaataaactatgtcctcgtgctcgagtatttctgatgccactccgggactattcgattagcccatcctagactagtttcttcttacctcttgccctattcagaagacatctccggtcaaaccattctcgagggtggcgcttttcttccttgtcgttgtctatggtcctagtggtattttttgttttgcggtattagaaaaaaataaacttaaattacaaacgcgtatttgagctttacagcattttccgtagtacttttgccctatctctccattaaaccatttcgcgtgttgcgcttcatgtgaatatctctagagtaaacttcttttcttgtcggatgttgatttcctatttgagctggcgttcctttcacatccccgaagctgcagccttggttcagcaactctcaacatatcaatatcaacatatcaatatcaagctgagaagagactcgctagcgtactggaggagtcattgcatgccctgttagaaactcagtccaaggatgctttgagtaacgagcctgagttgtcgaggagtgtgtctaggctaacaatatttcgtttcatgagttgctgattctccacaagtgtctcacttttgctaaagtccctagtattataatgattttgtgttccttttccgtaaaaccggatttcatatcctgtaatgaaatctaccgatacatgcttcccatatacctactccaaacactagaacactagaggcctctagcttccgacgcatcctagttttacgaaaacgagcccaggaacgagggtcgagcaaggcctttatctgtcacctgcacagataaaactcactcaaatttagtggtgtctgtcttgaattccgatactacactccgaggacttccccaagaactactcgcccatgcagtagtgaatattgccattgtgcattgtatattgaagagggttatttggaagtcgtggttttgatttcgacagtaggctttacctgtggctcgattttggaaacaaatccatctgggaattcggtattcttgtaatgcagcttcactttttttcagctgaaggatatggttccagccgaatctatagccaatatctgagaggaaagcccatacgataccagatttcgccgccagcgtagaatcatacgaccgaaagcgtcgaaagcctctcgaatccgatccttttgaaacataaccagcaagacaatcgtaataatctctgccatcagcggggtggagaaagcccaaaaaaagcgtcgaggagctgttcatattacggatatcaatatgttcataccgagatagctagtcacaaacgataacggcataaacaccatagtcacgatagtgaaaacaaggatggcttttccctgagtctttctatcgcacgtctactccgctgcacgtctggttggccccaggtcagaacttgcgtaagtttctcgcctcttatgataggccttcacgatatgtgcgccggtcatgagtcatgaccctcatcagcaggtcctgaaaggcatcaatcaaactctctattagctgacaccccatgctgggtctgagctgcccgtttgcaagcttgtcattcgactcctaattaccatagtatgaggcaaagtacctttttaggtgtagtcgagtagactgatgcttctgaacggtctctaagtctaagtagtaatcggtaaacgttcactgagcgttcactgaacctcatcagttattgcattctataattctcttgcatgatcaacctaatacatacgaccatagggtgtggaaaacagggcttcccgtccgctcagccgtacttaannnnnnnnnnnnnnnnnnnnnnnnnnnnnnnnnnnnnnnnnnnnnnnnnnnnnnnnnnnnnnnnnnnnnnnnnnnnnnnnnnnnnnnnnnnnnnnnnnnnnnnnnnnnnnnnnnnnnnnnnnnnnnnnnnnnnnnnnnnnnnnnnnnnnnnnnnnnnnnnnnnnnnnnnnnnnnnnnnnnnnnnnnnnnnnnnnnnnnnnnnnnnnnnnnnnnnnnnnnnnnnnnnnnnnnnnnnnnnnnnnnnnnnnnnnnnnnnnnnnnnnnnnnnnnnnnnnnnnnnnnnnnnnnnnnnnnnnnnnnnnnnnnnnnnnnnnnnnnnnnnnnnnnnnnnnnnnnnnnnnnnnnnnnnnnnnnnnnnnnnnnnnnnnnnnnnnnnnnnnnnnnnnnnnnnnnnnnnnnnnnnnnnnnnnnnnnnnnnnnnnnnnnnnnnnnnnnnnnnnnnnnnnnnnnnnnnnnnnnnnnnnnnnnnnnnnnnnnnnnnnnnnnnnnnnnnnnnnnnnnnnnnnnnnnnnnnnnnnnnnnnnnnnnnnnnnnnnnnnnnnnnnnnnnnnnnnnnnnnnnnnnnnnnnnnnnnnnnnnnnnnnnnnnnnnnnnnnnnnnnnnnnnnnnnnnnnnnnnnnnnncgccggtgagttagtagttgggtgggtgaccaccagcgaatcctcactgttgtatgttttttgtttttatcgtctttgcagcaaacaataaggctttgaagtcatggaactaaggcataagaggaaaagagtgagattcaaacaccagatgtgcttcgacctaaagtaagcacaaatacccttggcatatgcagacagccccaaatgaggaaattgatccctatcaattcctggttaatgcccaacggcatgcatgggcattttggaggtcttgtttgacgcctcgattcgcgacctagttaccccacataatcctcagttctgctaacagccgtctcatcgagttgctatgctttggtacatcagggaaactcaacttgcacacaattcctgccgtcggcttgtcacggatggagtcacccaactggccaacttcgcacgagagcttcgaacgtcggggtccggtattatcgtggaggaagaccttgctgctatttttgagcgagggcggatttcacctgtgatcgagagtgaattcaagaagaatgtcaacatctagaagtttacactgctatgtcatagatcagagctcgatttggaggagggaatggggccgaaaatactgcgagcattccaggagcgaaagtacctcgcgaccgtacctacattgtcgatgctcggttgtttatattcctctcaaaccctggcgaggatgatttcgaaatccatgactatacgtttcaaggtgaaggttgcggatgccacggcggacccgggtttgatggtgttatgaacaagctggtggcttgtaacagtcagtccacggaattccaatgatctatataccgtgagatagtagaagacgagctacagaagtccaagtccaaaagaccatctatatccttcaaaacctcttggtaggatattctgatgcacgtacactatctacgtaactgaaaagagaggagttatcatcccatatgtatatgtgtaagattgattgctgatgatctagctactgccatacctttcaaataacttcatgtggacaaagacacaaagtgcttctgctctgggatcccggggagacgtctctgcaagatgcgaaaagggatctaccgtaccacgctcctagatatctggtaaggaggctgccaaagagagacctgcctagctgcataggagtacccaacgctcaaatgcatcagatcactcatataaggatccccccaacagggagtgccatgtggcctaagcctacgatgaacttctccagctatctcccaatcaacgaggcccacgatcttgtcactgtcaactatacagtgacacttagaaaagtcgttgtgcatgaagcttatatccagatcggaagaggatctcgcattctaggggttggatacggccattttggcgaatctttgggtcgggcacgacgtaagaccgaatctggtatccatcggtaggcttgacggagtgcagctgtcgaagtatctcccgtgcttgctgtttgaatgagtccctttgggcttgcgaaaggtattgccatgcgatggctaatgaaacgtctgggagtctttcctggacaattattgggccgccattaatctaatgggatttaagtactataggcgcaatcaagcagcgagaacaagtaccttgccagtaaagtaaatatcgggcactctaatatctttcaagacattcttcgcaatagcaatcgcctggatctcattggtgccagcatacgagtagtcgatctctatatgctcggcaccttgcccgtggaggtggctcgacttgacgatgatactaccaagagcgaacacgtcacgaccaccttcgtcagccggatatattctagcagattggtcgcaaagcctggtaaccgaagcccattaatccaatgagtctctggactgatttaagaggccattatctgttctctcgttttcaatcaggtgctccggggaagttagtcaccctctttcgtcggagttgtaatgctcttggtgcttctgggcatgttatttcatctactaggacatgtgctctaaacgtgagtcgacagttatatatatttccgactaatccttgataaatatctcactttcattgcccagaatgaagagatctctttgtagcatctataggtccatcttcatcaatagctggcatgatagtttagtactttaagccatactaacttatttgatcctattatctacatctactatccacatattcgaaatggcatcgaaatgtcctctctgtcgtgaatgagttaagacgagcagtgctccccatctttgcccagtcgagaaaatgccgaacgccgagaaaaagctaccatcgatgttggtggtcaagcaacagcaagacgttgtcgtttttcatgctgtcccgatctgagctgtcagactatgtgagttgatacccgctggaaatgacgttgtgaccctcattaatgcttcaaaatcccagattctcaacagcttggtaatgcaactagaatatgccacgcccgaacagagaaaaatgagagcttgcgagttagcagggagtgaacttatcattttatcattttagccttgtggtgtccttgagccctgttatgtcattagttggaggacgaagacccgtggagtgcctgtctgagcagaactattgtagtctgtaaatagtacataggcaagacagtttcatcacctactaaacttggttgtcgaaataattaattatatcacatagttaattcaagatagtactcatatcactacaagtaaatatattccaatctgtcacggataacccagtggaaggctcaccgccatgccaattaccctgcttcggccgccaaggccagcaggaaaggtgcctggtacgaatcccggggttggcattttcactcgtgcgagtaatccacgacgctggaggccactaagcaatggaaatgacacttgagggaagcaattctgcagagacatttccaccccgggatggcgtcgccagatgacaccgtcctgttacaggcaaattggcaattttgtgggacaactactattttttttgctttttctttatatacatgtattgattgtagttagttatatctaggtctactcagtaataattattgccatgcctcttgaagcttcattctgggagataaattgagaaacaagttaaacacgctaataatagcatggtaaaaatgtacaagaacgtgagaaataaacatgaaaagaaatgataagtgttcataagacaagagaaacaaaatactcaaaccagtccatcaaggtgtccccatatgagtctcgtgcgatgcatgaaccgaagtattctgcgtctgctccaagaccacagcatagaatttgccttcttctgaaatatcacggtagggacctgcagagacaacggccctgaaacaatgccaattagcatatgacttcacattctgatatcagaaaacgcccccaaaaagagtgacaaagaaaatagaaaataaaaacataccatcccttatacttcggctgattgaagatatccgtaaacaccctcagcactcgcaacggcaactccagcacagaaggcatctcaggcccatcgccacaaatgggtaaccccagcttgttgacggggagatagatggtctcggcgacgttctgcggattgcgcgtctcctggaagatgagaaggcggcgcgaggcgtgcgacggcggtccgcctgctggcggtctggcgtttgcgcttgcgctcatgctcatcgcgaaggctttttgagtgtgtagagtacgcaataggtttttgcggaggtctgtgttggattttctttttcttggacttggtgtttggaaggatggattgttcagtttggctgttcctttttttttttttggtgttgtcttttacccgcttggacttttctgctgggtctctggcttcgatgcttagaggaagcgcgtttgctttctggggttattagtacggtctctttgcatgtagttcaccaagggcttcttactatttgtcgacagtggcgtgtagagggcgcgacaggctttgcttatcgtttggcgatcagtgtcccgattaggagatcgcggggcaaaaagggggggatttcagagatagttgtatgtggaagatgaagtaagatggaagttgaatgtcgactgttggttttaagaagaaaaataagcccaacagaagagggggacttaatgggcgatattatgattgttgtacctactgaactaataatctcatacacaacatcattgatcatgacattaattagattattcctatattctagagtctagtctcccgatgacctaggcacaataaaatcaacagctaacagagaaagaaaaagaaaacgctgggtatcatgataatgtggccgaagagaaataagcaaaatcaacaaaagaaagtcaatcccttaaaccagggatgaatcatggtatatggcatcattcactatgcagcgagatgagaagcgatatgatcaaatcaagcatcaagctctccctctagcactctgcgtgcagcatccagacgacgccgcagcacccgcgcagccttttcatcggggtccgcagagctcgtgattgcctgcagatccatacagactttaccaaggctggcgaacagtgcttccagcatctgtgtgtcatcatcgttgatgccaccgacactgggggtgctggatgccgcgcgcacggtggagacgagggacgagacaagagaggtcggggttgcagaaccggccgtggctgaggatgagcggccagtatgcttctgaggggaaaggttgtttgggtccagtgaattggtgtggtgccgtggtccacggggtgtttcggagcggtcattctcagcctcgatctcttggattggacttggctggtagctgtggtgagtatgagattgggaatggctatggctatgtccgtgtcgcagctctgtccagggattagtgtcggaaacgtgaggggaaaagaatcgcgggaacgcaccatggttaaaccgtcggtcccagtacatcacgctgtcaacgtcatcctcgtcatcgggacgctcgccttcgtttgcggtggcgaaggttgccacggtcgagacggacatgttgctgttgttacgggagtgccgctttgtgtatgcgggccgggttgtctccactgatccgttcgagctgttgcttactcggcggagttgctgggtgtagttgcccagtgcactatgcaagatgaaatgctcatagtcgaacgcatcctcgcgcagctcgtggggcgtcgcgtccgtgtgcgacggcacgttagggaagacttccatgtcgctttcgaggtcatcgtcaagcggttcacgtaagatctcatccagagcttcgcggtcaatttcctcattaaaatcaccttcttcggcatcttcgtacatggtctcggcgatagattggtcatcgccatagtcaggctcattgccctgccaattctcggcgtgcttggatgcatttccagcagcgtgctcggcggatctgcgtcgatcttccgccgctatctcattcgagacatcccgagtgttttcagagctggcttcacgtcggggattggagccacgactgctctggccatctctgagctccagcgcattcgcataccagtgatcggcggccgtcaaggggctgggcgttcgcaggctttgcaaactacgccggcgaagattgtcctcctgattcttcaccttcagagaagagattttgatgtgaagccccttcatctgatactggagatcccgcacctgcagttgcgactgcgcgcggctagggggaccaaaggagctgtagactggactgaaaccatccgggctcgatttcgattcctcctccgaggaaatgcccaagccatgtggcgagcccgacgaactgtcttcggtgaaagcaggcgattgcgccccttggccctccttctcctcttgcacatgtatcggaggctgggtagaagaaatcgatgatcggtgcgtcagatacgccctcgtaggtgcatagtggaacgaccgatcatcagtatgaagactggacgaagtgctcgcgcccattgcactgacagagcgcgaaacttgcttgtcatcattcgagaagctcgaatccgacggaacaatcgtctcagactgaccccttgaatgacgattattcgtcgtatcctgcgacgtaataaacgactgccgtcgaagcgaaaagctcttaggatccgtgcgcgaaatcgaccgatatagtacacccacaggctggtgcaaacccatcggctggatatagcccgaattcgagggcgagggcgatgagggcgatgaggtcgtccgcggcgtcgtcgaccgagctcgagtgagattgttctccataagctgtggattcaaaggatgttagtattactccctagacaagcggcaagctgcggcgcgtaagaaaagaaaccaacatacattcaagcgtttcttcgcattctccaaaatcctttccgcctcgctactcagtatcgccgaggaaaactcctccccgggccccttgccctctgcagccgcagacgccaccgcgctactagcaggcacggaagagccccctgcagttccaatgaccgcggtagcttgcgctctcgcgacctcggggtgaacgggagattcgtcgcgtccgttttgcgcctcggacacatccctggaagcggaagcgcgtctgctccccgcactgattgtggaattggagctactccactccctgtttggatcatcctgcccacgtaatagcggtgagctggctagctcttgctcatccgagtcgccgaatccctccaatctggcgggcgagagctcctcgccgatatctgagagacggcgactgacattcacgtcttcgtgtgtccatgcatgacgggaaaaatttttcttctgtcgactggatgccgacatggaggcattgggatccgattggttgcgggagttgaagtacgcgatttggggtggggaaggagtttgggattcgcgttcgacttcgtatggtaggatcatgtccgggtctgttagagtgagtgagggcatgatttcgctctctcaggccctggggcctgggggggttttccgtgcagaattggtagaaagagagagaggaaaagggttgaagtcgcagaatcgtcccgtagacgggttgggtaccgttacagttagtttctccccttagacagtttagcgtgccctgatcattgccttattgggatctgtgaagatattcccaatttcctgtctcatactctccgtccggagtaaaaaataggggattaggcttcgactacccttgcaattgtcaatcgtggtagtttaagtagtattaggtataaaatagttagcgggtgatagatcagatcaatattagactatatacggagtacggaggacaccgcgagaacaataggctttctcgggttataataataaaattacgtagaaaaatgtctatgctttagtctctttctttaattaggattgtctccgactgttcgagccatacggtgtagtcaaagagacatggccttgagatgtgatgtatacctatgcatactccgtataggatgcattattgctgtaaggatatgacacaggcattttctataatttttaattgattgcactatatactcacagtcagctgagtatctccaagggtcctttgctatggttaaaataacaatggaggaacccctgagatcggccagccatatgcccaggtgagtctaagttccacaccggtggagattgtaatttcagggacatctcaacgttcattagaggaaaaaagatataaacgttgagaaaaataagagaaaagagaaaaaaaatgtatgctttttgtatacaacgtaattacacatgccataatcccgtagaaacgcttatatctagatcttcgatagcaacaacttcgcaccactgctactcgggctgggcttcttctttccatccttctccacgactaacgccgaggcctgctccagcgccttcttgttcttcttcagagtcttgagcagctcgctcttcttctcaaagtcctccgactcagccagcgcgacaataacgaaggggttagcccccgtcgcccagtctaggatctcatcctggatctgcgcgtacagcacatcgtggaagttcaacgcaggctccactttctcgatagacttcgaggccgggttgaatcgtccaccctgcacaagagacttgagaagacgtcccgcgtgtgcggtatcgcgggcttcggtgtgcgacttggcggcctcggccacggccgcgagagcggcggtcttgtcgccgtcggcttcgaacagcacctcggagaggaactggcagccgaaggtcgtctcgaggagggtagaggcgcgggcagcgatgaattcgagcagtgttggcgaggcggccttgacgagttcctggcggcgcatggccgggtctttcttcgaggtttccttgcggacctcgcggacttcttcaaggaccgtttggtcggcctcggggagaagccacttgacgcgctcaccggcgaaggggtatagcacagcgatacgtgcggtcaggtcgttgacctggtagcagagttcctcgttgcgggcctcttcggtttcattctggttcaaaagctcggggaagaaggacttggcgctaagttttgtgtcatcaatgacctcgtacgcggcaagaataacctggtgaccgtagacgtcgccagccatggccttgacgatgtcgcggaagaatcgtataagcagcttgcggtctttagcgttggagtatgcaagcataagacacatcaagcgggagccggactgggtgaaagccaagttcttgatcaagtcaccctcttcgtcacccttgatcagctcgataaactcattcgcttcgttgctgccgggttttgtgcagaggaaatattgcaacatagcatcgtgaagcatggtgaaaccagtgctcttcttctgcaccagctggttaatcagctcgcgcaagtagttcatgatcggtccacgcttctcggggtgggcttcgatgatcttcgcgagatcggaagtggtttcattctcatcttggaaaatgacaaactcgggaccgtaccactcgcggaggagtctggccttctgtgccctggtcgcaactgtgcggtagatgtcgtcgagaatccatgagccctcggggtggcggatgagacgtctgacatggccgtagaactctgggatgatcaaatcgcgggtctcgtcgtctccgtggacaatcaactttccaaccaagaacttagcatatcgactttgcgccagctccttgtaagtgcccttcaactcgtgcgcgatcagtttgcgctgctcaaggtttccgtacttgagagcagtctgaatgactcgcaccgagtcgtgcttgaacacgaaatcccgaacgcgggtagtgatgatctcaaacagctccttgacgagcttctttctctgctccaaaggcacatgggacttgcggcgcaattgctcccacaatttcttggagcgggcgacggtatcggcattaggctttgcggccttgcgctccagctgaagtgctttttgcttgaggtgggattcgcgagagtctaagcgcacaataatgattagatgtggcatcgtcaacgaggcataaatgaaacttactgttggggttctttggggcctctttctgcgctctttcctccgcattgagtgttctgcctgacttgggcttctcctcctcctcgctcacatcgggcatctcagcatcgtctgaaagggcatcaatatcttcgtccgagacatcgtcaatgtcgaagtcatcctcgtcttcggattcttccatctgaaccttctttgatggcttcttgtcgctcttgctggatttggggtccttcttggagtctttcttggatgaagagctcgacttcacggacttggacttcgatgcggagccttccttggtcttgctccgcttgccattgcgctcttcgctgccgtcaacagcacgcttcaatccagccattatgaaagatgatttccgtaggctgaagggtatctccgattgaaaaaagtaataaaactggggtctttgcgagcggagactgctcgatgtcctggtggataattttttttggtcgcaggcggaggaagtttttttgccggctgtttgcacagtttgcactgataagatacaaaatagccctgccttttcagcaagttcatacatgtactagtatgtagcaatgttagtattcaaataaccatttatatagattcttacagaaatagatcgaataatacgtgtatatgaaaggacagattgctatggacgttttatgataataaaatgtaggacaatgtctctgaacgaagcacagatgactcgagtcgcaactcgacggcaacagatgtacaaaatgctaataagtgacatgagccactagactctccagggacaagatgatgatccctactgccatcgaccaaatcccgaattatattactcttgaacgagtgtggcttgcatcacccgaaacaaacccgaaacgccgtagagagaatcacaacgcattaaagatatttcatcacttcatataccaccggggggtgcaggttcgaaggaggttgctttcacagatgccagctctgatccgccgccactctggccgcgcttccgcccaggaatgtggaagccgaaggacgaggtagaagacttggacccggatgattgcgcatcattactagagtcaccaaaccgggagaggaagccctttttcttaggtttctcgtcatttaatcctacttcttcaaaggcttcttcctccatgattccagacttggtaaggctgatggactgagtgcccgatggggttaatcgggagaaccgagagtcaagagaagttcgagaggggccagcatcaggatggatgatgggtgagcgggcggaaatatcctagattgaagggttcatgtcagtcgggtttatgcggatcggatcgggtcgcggggcatacaaatgatcggcggtaagagtcaaaggactcgcgagagatggagaacggctcattctcgtcaactagatctcgatggttgatggttttgttggagcccgggtatcggcgccagaaactcggccgctcggggggggaaggctatcacggtaattagcaggtgtatcatacttcccgatcacacacagcctgtaccggaagatagacgccgctgtcgttgaccactagagaccgaagtcagcattgcaagcaagtacacagccacacatagccacaacggggattcgaacataccactcaatttgtactcggtgggctcatcctggctattgcggatcggtatgggcgcaggacgttgatttggagagagatagttctcatccacgggagcgggttcctcattgggttgggactttcgtcctagaaagttacgaaatggaggcatggttgaagaagtcaagtgtggagatttcggtgatttcccctgtgaagggtcccacgttagggtgaaagtgccccccgattctggagcctacgtcatccaagaagtttgtgaaataatgaagaccatcagccaatcagattggaagaaaatataagaaatattacataatcttgtatctgccctgacccagtccctgatttatgtccaacctcggcgcacatgcacaggaactggtactctacataaacagactacttctactcaaggaatggattaaatttgcctcatacattcaagcctaacgaataaagctttagagctacaaagatcagaagaagaaaaacatacccttcaacacctgcaaacacccattgaaaaagatcagaacattccacttccatggatgccttcgatatgttccatcgcagttcgcttcatgaaaatagatccacctgcgaacaaactccataagcaaatcaaacccaagaccggcctcaattcagaagctaatccaggcttggactgatgccatgcatttcgctatcactttcgtaacagtgagtctcaccagcaattgacctatactgataacgcaaaggacgaaaaaaaggtgactcggacattgtttgttgttgattcctttttgtttttttattgtgcttttaatttttgggttgtcagaagctaagtggcattgttgggctccagaagattggcactgtggtggcaatccagagagcgcgagtcggatgggtcgaagacggcgttcttgcgctgttcgatgaagtaggctgtgcagaaaaggaatgttagttaaggaactccaaatatgtgcaaatcatgatacaatgtgatacgacgtacgggtcagttgaatcatatcaaaccagcggacggcgttctcgtcactgccgtcgactgccttcagtataccattgtccgggcggaaggtggccttgggaggaatgtggcgcatgcgcaagagcatctccaggatgtcggcgaagcggtcagactggttgaagtagtagggaggacgcttgtcaaggggccactggatggattgttagtgtgaaatgcatcatggaagaataaacatggaccacttacgcgctgagaaaagttctcgttgtcccatgagcggaacagccagcaggtgcgttccacgcagttcagcaggataatagccacaatgaaagtatcgaaccagccgcacttctggcgctgaaggagtcgacgttccaaatcattgataacaaacttgctcagctgcgaggcacgcttctccatggcggcgcgcaactgactgcagagaagtccatatgattccgggtcagagacctcctcgatgggcagacggccctcgtccgatggctgagaaagagagtgcaacgagttcgggggcagagtagggttgtagtaagtcttccaggtgagttctgtgtcgacgagaatgtgggtcgcgacccacagctccaacacgcgttccagaaggatatcctgtatctatgtcaatgcacgttcccacgttgaatatcagaaaacataccttctttccctggctgagttcagccgcaagcagcaaagtgggcttcatgaaaggcgaggtctctcgctcgtagaagtaagaagcattcttcttaatgtacatctccaacttatttgggatgtcatccgagtccgcgtccaggagatagacttcttgcgaaggaccagagaactggtcatctccgagggcttgcaactgggggtcaagtgcagacactgaactgcggtgaccctgcagtccactgaaagtcatgaaggaattgctctcctcgaagtgagtaacttcaatgcgaccggagtagtgttcaaacttgatttgatttttgatgctgttagtgtcatggtaggcaagggtagagttgagatctaaagtccgagtcagtatatattatatcttcaaaaagaagagaacacaaaaaacatactcgcattgtatagttcaaactcatcggaaagacgggtgcgcaggcacgggtgcttccataggcgggcactctccacgctagcgcaagttgtgcaaggggtatcgccagagcactatcaacacttgtcagtaatattcacttatctcacacccacacaggttccaaaatccatacaggtttcttgagcattcggcaacgaagacatgcacccttcttccgcacgtcttgaacttcacggcgtcgctctgcggtgaaacgcccccgcaccttgggtttcataggcttggttgagttaccaaactcgttcacaaacccttttgcctgggtatttgggttcatcgcaatagggcgggggtaagatgcagcacgctgagtggcagcagtcaacgaggggtcatgctcttgcaggctgtcgaaaagaagctgctcatgtgtggacagttgattccattggcctagcttcatatcagagctaaggttatcactgtcaatcgacattccttgagggaccatctcattggcggaggccgcaatcatcgacagctgtgactggcgcgcattagaggtagaatcaggcgacatggacgcatcaccgaggggcggagacatggatgcagggtgctcgcccgaagtgtgacttggaagggcaggtatactaggagcgttggacgattggggagttcctgcaaattgttagtggtcaaaggcgtgcaacaatgaacgaaagaaaaacataccctcggcatttgctgtaccgtccatcttggggtcagacccttgcgagtgaccttggaatccctccgcttcaagcgcaggatcaacaatcacggtcttgcctccagctgtcacagactgggtgtatccaggtccgcgcttggtcacgtctgaggcgccgacctgtcgcgaggcttcggccaacacgttgagaccgtcgaagttctgtcggttcggaaatccaccttcggcagacttgcttttacctccagcaggggaatctttattcgagtcaccgtcggtcaagtcggggagttcgtggagtcgcaacaacacgcgttggcggtcgcgtaggggaatcgcctgacattttttcaccagatggttggtaaggctgtcaatgcgacccttggggaacacttctccgcaggctttgcacgtatgctggtagcgattgctcgcgtcttccagcttgggacctcggtggaagaactcgaggatgagttggttgggtttgcgacccattgtgagggatggccgtggacgtgtttttggaaggttttcacgtgtcgtttagcggtatagtgacagtgaacagtcggccagagcaatcgacgtgtcgctcgttcagactaggcagtgtatcccgccaagctgataggtctgtggactcggattagaaatggggaatgtgggatgtgggaggaaaatcacacacacagtcacaaggactgcaaggcccaggctgtgaacctcagataggaccagtagcctcagaagagactcgaaatggaatttagaaaaacgaatctcgagatgatcgagtcgatgatgtgcgggcaaaaccagggcagtagagggcggtctgggaatcgcaaggggaggaacacgcgatggaagcttcaccgcacgaaaggcggtgatgtcttcaaggcggtaggagaaaggcggtgatgaaagaagaataaggatatctcgatatcaacttggataggagacgagggaaaggatgagttgttacgggatggggttgaagaagagaagaggtgagaaatggagggagaggatttattagtcactttgtgccactgtgactgccactccctctctctgaatctctctctctccttctgtatggaaactctatatatggggagttatgcaagctgtatcatttctttttctttttttctttttttaaggggttgataatatgtgtctacttgatacctagcaatacaaatgactggcatacatactacgcctacatgttggaaaacagccaatctaagaatatcgtcattcccgtgcctatatttcggtgcttccccccggggccccaaacctcaatttcccccttttgtgtatggccaatactaacaacactcagaactgatactctcatgaacctatggatggaaccttcatgctcatcaacaaatacggtgctcgggaggccgccagggcacacccaacagagcaaagatccgacgttcgttccggccctcaagcagccgacccccattcagtttcacttgctggttccgaagcacatcggtataaaggcccttttggttcaagcacatgcctttcttgcgtgccagcagtctcatactgcggttgaatatatcattccccgtaaagtatatcaacgccgctccgatctccgcatcaggaacgaacaataaatcgatccgacgccacagggtggtgccaggtagggctgatgcaccgtgccatttagatccatcctgatgcgacgagatggcaaggctagcctgcagaaagccactactgaacaatctaggtacaacaagaccgagcatcgtaatgcggatttgctcaagcgaggcaccaggtttggtgatcagacagtccacgtccccgcaggtgagtgccccgcggcggtaagagcccgagacgatcacctgcatatccctatccacagcctgcaccgcctttcgcacgatcgccccgtgggcttcaacctccttgcgggggattcgttgcgcgaagtcgctgtggcgttccaccccaatacgctgctgtttagtcaatggagctctttccaataaatccttcagagacctgtagccctgtgcgacccatttggaggcctggggaaggccagcaccatagacgccgagaaattctttgattatcaggtcttctggggtattattggtgttctcgagacgacgaaggcggttagtcatgacaatttcttcgattttgtcagccaaccgctctccgataccagggatggcccgagcctgtgttcgcgtaacaatcttgtttggttgctttcgcaaagcgctgatggctttgcgataggccataacccgccactggtctgcagtctgggtgtagtattccagcatttgctcaagtacctcaatggttctgctgtttgggacgtcaagcttcgtgtccggatcgaacttctgcatacaggcgaaaccttttgtccagtcggattttcctttgcccttgccttctccggtggatgtttttggtgttttccaacttgactcctcccctgagctcgaggtttcgttatcggaagcaccagcagattcgtcaacgggaaattcgactggatccagaggctggttgtaaagatcagttctgtgaactttcgccgacggggaagtagttttaccaaatgacttgtggccttagcctcgtctattatatcatccagtgcatctcgctcccgacttcctcttttacaagcttcttcggctgcaggttcatggaccggttcagagatcatattattgggcacactttccggtacaatttctggtaagtcttttggcaaggagtttggcgtcggtttcttgactggcgataagcaacgttccggagactggtttttctcccgccgcgatggtttcaatggaagagaatcaggaagtggtggttccacaactggagacttctgcttctcggcagtcgttggagttccgttgggacgaaatcgaaggtgcgaggtatcaagaacggaacgaaactggatacattcggatggatatgattcattgacaagagcgacattcgtctacagcggttaatattaaagtctgggtatctcgtgaatgaacctactggcaaggattcaagtttgaggtagttaaggagatcggtcaataacaagttcttgtccataatcacatgagtgacatcggtagcccaattttgactccatcgtgcaccataatcctgcgctcgttgaatgcgcaatcgtcggaatggagatacatcgttgtttgggaagaagactggtattgagagttcagtgagagtaggctgtgggatatctagactacttacaaaagaccaatcccttgaagatctgctggtcaactgggattatcttagcattattggtctttcttttcttttgaggaggccctgcgctcttgatagcaggcatagttccagctgtccgagggcggttcgtaggggcaggcttagcgacagcgaacggactgcctctcttgctttgaaggtcacacgaagatatagggtccgaatttgctcgaatacgctccgcgaaaggagcgactttgtttggattgggtttgtcgagtcctttgtctgcagaagttagaagattcccccagctatcatcctcttcatcttgatcatctgagtcatccagccgatcaagagccgtaaaaaagctctttttagttggaaataggtccttcatagtaggctagtccggattccaatggaggggcggctgcctacgccaggggtggttcattatataggctagacctcgggggtcactgttaccgcacatccatggatgactcgagagcaatggaagcgtaatggtccgaaaacttccttgggccactcggacccgtggatgcgagacgcgattgactggcgcgaaatgggcgccaagtcacgtggcctaatttagatattcacagagtgacctataacgaggaatatcgaatccgtttggaaatagcccccttgggtagacctaggtggtaccataagttatcattctaaacatgtatttcacgatctattacctcccaataatagaactagcatcgacgactattcccaaattggaaatattatgtcatgtgactcttgatttccatggaagatcaaatgcgcggacaagttcgaaagcaataacctcacaatccaccaccctacacacggcccgttgactgatagaccgtgagccaatatgtggaaatccgccctccccacatttgtggccgacctttccctcctgcagactggccgctgtctaagctgccaattccgcaacccagcaactctctcccagctacggaccaaacccttttctctgcgccaatattccagcaagcccgagaaaccaatcgacacaaaagaccccgctcctgtgaaacgaaacataagaaatgaggcacaccgcctatcgactgccatcgaattcaaacagaaccagtcccaggatggacctcagcctggcgacgcagactttgttcctccaagcctagatcggcccatcggtagcccgcaagcacccttagaaggacagaatacaggtattgacacgcggtccttgcgccagcggcgcgacgacttcaccaactatgaccggcacatcaagcggcgcaaggaattgtacgattttgcctttcccccttctcttcttaacaccccgggatatagcccaaatccggaaatagtagggctgataaacaattgcaactcataggacaaagcaagtcgccaagccgtatttccgcgaatggtccaatctccgcttcgccgagggcaagacctttgtctcgaacccgcggctcttcaaagccgacagagccctttacttcccgaacatgcgcggcgtaactttggcaacgcccaaggacccccaggacaccacgacgcagctgcgcggcagcatctctgttgtaaacttgttctcgagcgtgtgggctgagagccaggttgcgacgtttacagggccagagcagaacccggcacttgtggaggcgatggccagcggaggaaaaatggtgcagaggattgatatcaatctcgaggagaaccggttgaaggcgtttctggtgaagatgttcatgtggcggatgcggcagaaattgcccaagcagcagcattcgcgctacttccttgtgcagaagggtttcgttcaggcactcaaggagaccattggcatgatgaattctaaggtcggctatgtttacctggttgattcggagtgtcgcattcgctgggcggggagtggaccggctgaaaagtctgagttggagggactcaatgctggtgtgcggaagcttattgaggagaagaaggatgttctccgggttcaggatccatctcgcaagtattgattaaggttgtgatgagaaggattacctgaactggagcctttgatgtgatttcattccgctctcggttggatttgtacatacaatagagaaactgtataatagaaagtataaataggcgccttcgagaccctttcacgagaattatcatcgattctgtcgcatcccccatcaagggggactcggaacatgcctaaacccaaacgccttcgagaaatccactcgctagagagcagcaatcgacataagaacaataagacatagggacggcggtgtcactgagctaccgccggagcctcgactccatactttaccggaagaacagcaacatcaaaaagcagaacccaatgaagcatccgaggataatagcatcccgcctcttcttgtttccaatcttgccgatgagatagttcataccggggacactgccagcagctccgacaatacgccgattaatgttggcaatagtctcgctctggacaccgaagttctcattgatggcatacgcctggctcagcacgccgtccatcatactgtggctgttctcgactcggccccgctcttcaagcatgtactcggcctcggcagcggcggggttggatgcgcgataggagctgatgtctgaacggacgttagagagtaggtttgcgcggtcacgcgattcagaaatagctgcggtcagacgttgaagctcgcggcggtggtcttggagtatttcgcggtggcgggagacattgttctgtttaagggcggaggcagtgagggtggcttcggagtcgagtagacgggatagttgggcgataacagcctcgcgctgtacggtcaattagttgtcggtgcttttctctctgttacatgtcggtgaatggacgtactctttcgaggaggtctttcaattgcgattcaagccgcagctcctcctccgtgggtgacggcggaggtttggttatggatgcaaattgtgaataggtgtggaaaaggttctcggtctatcgttgcatcagttaatattcgtatagggctcctgatgaggagatattggtacctgagtttcaagcgaccgtgcttgttgccggagctgtgtccaacctgagctagttgaggatgccatggtaggcaaggaatatgtatagtttggatatgaagtcaccggagagatctgatatgtttaagagtttctttcagaccaactagtcaacgtgcaagggccgaggtgctagttaactagttacctgcttgtctatgtacgtaagtgcccatgacggggtaaagtgcgctaaccaaatacagtaattctctgccccggatcccaggcaccttccgccagaaacttcaggcctcaaattcaggctttagtgccaccgtaatcacgtgcacccgctaaagtcacaaattcgcttagccctagtcccacaaccagtcgcaaattgaccctcggacatcttcaattctcaacgtcgacaacccacacaattcaacgccaccatggtatgtcgtgctgtgctacggctctgatatcaaaatgctgatgaatcgctctttttttgcagtcgtccaaggtcaaggctggtcagctctggggcaagaacaaggatgagctcgccacacagctcgaggagttgaagttggagcttaaccagctccgcgttcagaagatctcttccggcgcttcctccaagactcagagaatgtgcgtattcgacaccccccgatatttcattttttgtgcggatgggatttgaagatctgcgggatgggaacgatcgagaacccgggccagacaacgtgcaagaagattacgccaacattcaaccaagggatcaacgaggaagaggtggattacacgatctggcagaccgcgcacgatactggggccatcgatattcgagatttgatactgacggaaatttttttttctagcggcgaggttcgcaagtcgatcgctcgtgttctcactgtcatcaacgccaaccagcgcgctcagctgcgtctgttctacaagaacaagaagtacctcccgctcgacctccgccccaagctcactcgcgagatccgccgccgtctcaccaagcacgagcgtacccagaccaccgacaagctccgcaagcgtgccatccacttcccccagcggaagtacgctgttaaggtatgatactccgacaatccagcgcaggaacaggcggaatgagggttcatagatgttcatctttgccctcgccaccaaggacctcacccgtcagacgaaccgaagcaaccgagcacaatgctgacgatctatttcctgcaggcttaaacgcagaacttgttcggatatggagttttgtgggaagacgttgctggccttggacataagcaggacgtgacagttggatccgaaagcttatggaggggtcggttttctctttttttttacatccaaaaaatggaatttgattatgtatctaaataggatgcaaatcgactcttgacatgacatgattttagacattctccaagcttccttactcttgctcgcatgtaagaccagtgacgatatctcacggagatgcatagtctcaggactcggtgatatatatttctacaatatacaagttttgtgtggtccgcatttctaatctacatggcttgagtacaaagcaaacataactgtcggattaaagatatcttgctttggtcacaagggaatctaatgcgagacatccaaataccaccccaagtctacctaagattaatataaaaatgtttgaaaaccaatatatcctcacatcctaaaatagctaacccgacattaccctcggtcaaagctagaatgcgagccatagtatccaatctcagcctcgacgttccaagtctaggtaatccggttgccattgccatttgcactcgcagtaccaatccccagaaccccagtatctgtctcaagaacccacatgcccccgcaaagacaagaccgcaacagccccagcttagcaatcatcttgaacgacagaagcgaccggggcagattcgtatcaccagagacttcacagcaacgcgcacaccggcgtttctttaccggcgccacgcgaccatcattccccaacggcaacggcgggcgcagcgggcacttcttgaggatatcgacctcacggtgcctccggtacagcgccgtgcgtcggtcatttccaaaaccaagccagctatagtccccgaggtagatcgccatgcggttgatctcggatttgagcgccgggactgtctgtcggaggagggtggccacggcagtagtgaggactggcgggatgcgcgcattaaccagcaattccttttccgggccgggtctttcggcatcgccgaagccagcgccttggtaggcgtgcttcacggctgagtccactcctgccaggaacttctcatacacgtcgattcgtaccggcgatgattctagtgtttggcagatctctgtgtagtagattcgggagtcgcctagaagagaggcggggtttgcgctagcgaaaccagcgtgcacgccgcggaggccacggcagatgaagcggaggaaggcgcgcgacatgcttgagaggaggattaggagggggagagaggaagagtttttcactgtaaaagggtgagcgaagctggagttggttattaagaggttccttacacttctgtgtgaatgcttctgaatcatcgaatacatcttcgaattcgtcggccatgtcgaagatttcgctcagaagaaaatgagagaagtctagtgtccatttggtgttacccaataccatgcgtagaacgtcttttgtttcaattagcaacggataacgataaaatgggctttctttgaactcacctggatcatgcgattctgtctggcctcccttattatactggaagaaatatgcgaatagaactgaggcatgtctgagttgaaggcttgcccatggcacggccgatgagaggttgcggcgcttgagtctccctttgaagcccagtccggcctgtaagctgagacaacgaggtatgtacggatggctcatgagtttgtcctgttcggctgtaaagttgcaattgactggcagtgcacggtacacctcgctgatgaatgtggtttgagcctctttgggagttgtcagtggatttgatattatcaatacgaaggttttcaaagcactcacctagtgatagctgcccaagagcaaccatgagtatgtcatctgtattataatcaacgccacatcctcgactgaatgccaatgtcaaagccgcaatggccgcggaaagattgtctgcatgcctcggtcagtatttttatttcataaaagtgacctgataggccatctggaagatacatactctcgtcatagagaccctccgtggatccaaatgaatgctccatcgccctcagttgcatatgtccgtcactatccagcgtgacggcaacgcaagcattaggagagaaagcaatgtgaagacctgtccatgtcagttctagccacgccactatcgtttagtttcgtacctgatgtttcgagcgggtactggaacccagcctgggccagacaggtcactgcgcttgaatcgtcaagaccgttcagaacggccattgtccgtgtgtcgtagcaagttattgagctgtcatcatgactgacagccaagactgtcccatgctctactaaatcgaccgagacaatgtacttatcgcaataaacattctccagcctccgcagttccattttgggctgaggataggtcagtatcgattccacgcaacagtcaaatatcgaggaatgcacacctttgcttgagcgttgctcttttttgacgtcacttcgtcaaacttgggatggaggatctgcggggcagattccaaatgccacctgacaatcacactcggtgggccttgctggtctggataatcatgcatggcgtggagaggcttcgataagacagccaggatccaagggttagcagtggaccccgcgaggctatcaaactgtcccggcatgatctctagtcgtgtcaacgagtataccgagttcaaaaacggcaaagactgatcgtgatggtccgggccccggttaacgttcaatatattgttaggcatgtcgactttacagtggatcaaacggaaggtggggatagggaattggccaggcagttttccctgtgccggctcccattgtggcgggttccagctgatgtgcactctataaagacacattttctggcatgcggagtaggtggagagaaggatcccagttgttttgatgtgtcagtgatggcaggaaatggagctccgactgaaagacaataccttgtgttgcggtcatggatgcatgcgttaatagtctatccgagtaccctgtgttcttcagttcggctggcagctcggcccatttgctgtcggggttttgatatatcagcttgatctggccggctctggtcacacatatcagtgcgcctttgttggctgggtggaatggcccgacggggcgtcgacggaaaggcgaatatgcccatcggccattcaccttggctgcttgatgaaatgcatgcacctatattaccagttagagtcctttcactcttatcttgatatatcgatggataatacaaggggactcaacgtacataacgctgggagttcagccacatcatcccaacaacctggctgccatcatcgccggagtcaaatgaggcttgacgcaagcctgtgatgctgttcagtgcaattgaaatggaatagattgatacccgaccggaacagtcgacaacggccagttctgagcctgtttcattccatgatagatgggccagttgagtgccattatgggcctccaagactggagccaaagatgactcttccccgagcacccatttgccatctgatgggcggcattggagatagcggataataacccggattccgtctggggaaatagatgcaatacatcccatccgagaccaggcgattttcctagcagatggttagtgctggaatttggatgtgcaacatttttccaagcttactggcagcaccctgatagacgcatttcatctaagcattgtgctagacctttgattggggaggcggtcggcaagcccagctccagggagttgggttctccaaagagatcatccacatcgataccgtcctccatgatcaagggcatgatattatcggaccacttgtcaaatgtgtttgatgatcagggaatcaatagagcagcatagcttcatagagttcctcgcaccaatgaatatcagagatgggctttattattatttggtcaaagggggagtggattcccgagatcggcacccaatgttcgagaagatatcccaaacaccaacaaagatgtcaccgtcaatgcagcaattcccgatgtcaatatgagggggaccatagaccaaatccagatgttcctatgccgtcagcgcctggacctccagggaccaacccagtgatctgcttagtcagacctcgtgacacggatcaggtgacgggtagccctgccaacgaccgctgaccaatcagggggaatataaggtgacccactatttagcagagcgaatcactgccggtcccttgaactgtcaaaacatggaaaacagaaaaagagtggcaggaaaaatagaaagaaaatagccaaaaataagagaataatcggagaagcacaatcggaagtatcaagcgccggattagggcgtgaaagcgcaattgactactataaaccccctacaaagtacgatcaacggggcttcaatggcatcggggcatcaaagactctctcgcgctggactacggagtaattccctctggatttccgaagtatacagcgtagcaaccttgaagtcttaaacccacagccgttcgcatcaaaataacgtcgagtcccgcccttcccggttcggttcgctcaaatcaatttgctcctcagctcaacattcctaaatccattcggccaaaacaaagactgtttttttatctgtggcccgctcttttttctattctgtttttctccggcccatagagccctgaagcgcacgagtttcattaatgttcccccccccctaacgctgacctcatcgtcaacttccttcagagctacaactttcgacctacaactattcctactcttttctaccctctcttctatctatctcgaggtcttacgcgtcattgattcttgattgatctttattccgcatacattcatgattcctcttttcgaggttttctacggtctgtgagcaatttggaggtaccactcggtccttttcgccccgattccccctgggggtgaacattctcctacgccgtgacacctttcaacccattcgcaactcccacgcagccatgggggatctcaatttggatttctcatccgattcggagttgagctccgtgccgtcatcaccaacattagcagcgcagtcatcacccgagccagcagagcggtacccaacgccttcatcccaagtgggagctgagtctgctgagggttctgcgcgccaagcccgtcccgcaaagaggagacgaaaccccctaccaaaggaacgaactactcaatatctcgatctatctgaacctctctatgaacaaaatgcccaacactatttgctagttcaaactctgcgtcatcaaaaagacattgtcgtcatcgctggcgctggaatttccacggccgcgggtagtaagtttctgctctaaggattctgccatgtttgagccgacactcataactctgatagttccggacttccgctccacagatgggctcttcaaatcattgcagaaaaagcacaatctaaaagcttccggcaagcttcttttcgatgctgccgtctaccaggatgacgcattgacggcgcccttccacgaaatggtccggtcgctgtcggcggaggttgctaatattaagcccaccgccttccaccaaatgcttgcccgattaggtatcgagtctcgcctgaagcgactttacacccaaaatatcgatgggattgaaacctctatgcagccactggcgactgaggtcccacttaacgtcaagggcagttggccagtcactattcaactgcacggcagtattgagaagatggtatgccagaagtgttgctacctcgacaacttcaaccccgacatgttcatgaaagccgacccgcccgcttgcacagaatgtattgagaccgacgaagcccgccaaatcggcggtcaccgaagccacggaattggccgcatgcgcccgcgcatcgtgctctacaatgagcacaatcctgacgaagaggcaatcacctccgtgatgaacgccgatatcaagtcccgtcctcgtgtcctaattgtcgccgggaccagcttgaagattcccggagtccgtcgactcgtcaagagcttgtgcacgatgatccgcagtcgcaaggatggtgtcacgatgttcatcaacaacgaaccaccaagcggcaaagaattcgataactgctttgacttgatcgtcaaggggtcatgtgatgaagttgcacatgaagttaacctcaagtcatgggagtcagaggacactaccccatacgtgtacgaatccacgcccgagcccattcttcgtccctcaaattccacgggcatttctgtcgtagtcacaccgaaaaagagacctcgtgcagacactggtctcgccacgccttcttccagccacgacgagaagcccacgaaaaagccagtcaccaaagcttcgaaaatcaagatccaaaacccagcaagcagtggccggtccatcaaagatattatcaagaaagaaaagcctgctgctcgcaagcctacctccaagttcatcaccaagcccgcccccaatcctcgacccaaaaaggccgcaacagccgccgcctcgaaaaagagtgccatacccgccgttccggtcaagaaaatcgcctcgttcggccgtgttaccaaaacctctcaatatgctggcaagctcgttgcaaaggccgacggcaaacctatgcaaccggtctcagcgggcgcctcgaggaacaacggtcctctgccaacaacagagcagcccgagaaggcagacatgctcgatacagagtctcttcctcggccagtggcttcctcttgactattctatgttctagatcctgtactgatcttctattctatgttggctgcaagttcatgacatgatgcatggttaccgaatggcgtccttggtgttatttcccttcattgtctttccggtgccttccccttatccccttctgggatttccgtttcttcacttatgtttacatacttctcttcgtggactgtattcctacttgcatcacctgcgtttgctttaggttgatgattgctgctgtcctcttttcgaaagataccaattgatagaccacggtttctcgcatgggttggctcgggcgtttttgggacgaagctggcttgttccagcgtgatggggtttccttgttctatttctttttccttattcttaccttcgctcatgccaatctgcatgggtgtttcatgttggattatctaaatgagatctctacttgagttccacctacacattttgtcaggtgctgtcttgtttaatactctttccttgttctactaggaaacaagatggtttcttttcctttgttttgtgtctgtaatctttagtgtagtagggcattgggggttgatataaacatcaactcctggctgcgcaactgtaatgtacgtgacatgtcgaggattgttatactatattctggacttcatcaaagtttaccatcttcgactgtatccaagtagatatcaacagagtgcagcataaaatccattcgtcattatgtgtatagtacagcagaaaacatccttttcatttgccagtcagtctctcccaatgccgtccagagtgagttgtctttggctcattcacatagacatggcctggatagttagcccaacccaagatcatcccgtaactgactaccaggcccatcctcatcttcatccgtctcctcggcatcaggatcataaggccccctcctcgcaccaggctcacggtccaaatcctccacatgctcaaggttatcctcacgcggcgtgcgatcttcctcctcttcctcctcctcagtctcatcctcttcttcctcttcctcttcaacatcttcctcttgagtctcatctccatcatctccagcagtcggaccaacagctttctccacactcacgccccgcttcacccttttcgcggggttatcaagcatatcgacatcagcatcggcctgggtcgcgccttcgcctaacgcatcctccgtggagccattctcatctgccttctttggcttgcgcttcccggcttttatttccatatatgcctccagttcctgttcgagcctgccgcggaaagagtcgagttccagctcggagagggcgttgaagacgtctgatggggcaatggtgcgtttgagggttgcatcgttggcgctaggaaagcgagggttagttcgacatatcataccatgggatagagtagagcaaatcgtgctttaccatccaacatatttgggactggaagcacgccaatggcagcggggtaagggtgaaacatactgtgaagacagataagaaacaaacaccgtagcagccttctgcatagccaatacagcgtccttctggatcgtcgtattcggcgggagaaccgacttggcgagacgaatcgtcagtgagcgtggtaggagatagtcctatggattaccggagatagcgttagcctggtctggttcctcccctgcccatgcgtatatgaagagcccatgggtatggtgacatcctttaatacgcaatgcatgttcatgttgtcttacctcgacacttgcgcccgcctcagcccgagccttcaactgctgctccgtcgcaaagacgggcttgtcggtgtgcgccactggagacgagtgctggagcagggaatcatcaggatcagcgggcgtcactgaggacgtggatttgcggggtggcatttttgtatgtttgaagcaggtaggtaggtgccttcgtggcggttggttcaagggatcggggggttgacgatctgggccccccttggatattgaatcgaatcaaggcctgattgtttctctgtgaaggtcttgagggttgtgtctaactttgggcggcagttaactataggctttgaagagataacgttcgagggttgcaaggaagacgcgccaacgcgttagatttctcgatgcgcgagtgtggggggcttggcggtgatgtctactctacttcgacattatttatatttctatattcacttctacaataatatttattacaatctacagttttggtggggtttatttgcaaggaattgattttactgatgtttttataccattgaaattgagatcaagcctagggaaggatggaatgccaacataaaacgcccactttttggtatccagaaagatagaatcaaatagataatgagttcataacacgagcaggaagagcggcccttactcgaccatctcatcgtcatcaccttttccattgccccagagaccctcgatgctgaactccttggcccactcggtgacaacctttgtggtgtcaacaccaggctcgatatcgccagcaggagcatctgccgaaaccacaggcagcacgggtgcagtggcccagccttgaatgcggccatctctccagtcgttgataacggtcatggcagcgctctcgatgttggggataccgtgctttccgagacggccgcgcttgcgtgccacttggaccaagaagtcggtggttttatcgccattgccagggaagagggcggtgatgccgtacaactcgagcatcttagcgagaaggttctccgatgaggataaacgcttcatcaagaggttgactgcgggaatgggatcctcgatctgcttgggcgggacagcgttgaggagaatcaaacgcgcctgatcctcttgcttcttgttcttcttgctagacttgtcggagctggggaagacgattccgggcgagtcaatcagcttgagtctgctgtccagcttgacctggcgcaggctagtggtgacaccagcctcggcgcctgtggggcatgcgttgcttgagcccttgttcagacgtgcggtgagtgcgttgatgacggacgacttgccgacattagggtatccaatgacaccgacggagatggctcgcttcaactgcttggcgccggcgtatgacttgagggcacggaagagtgtatccgaagtacccttgattgtcaactgcttgtggtcgaaggtgtgtgcgttggaagtggtgccgctggatgccttaagggggagagtggggaaggagcggcgcaggtgaagcaaccaagccttgagcaccggcggcggaaccagatcgatcttgttcaaaatgagaatcaatcgcttgttaccaccgtccgccatcatgatctcgcgctcaatatccttagagcgggtaccctccgggtcgcgggcatcgagcacgtatagcacgacatcggcgttgtcagtgacctgcttgaataccttgtcgaattggcgtcttgagctctcctttgagtaagactttgagttgaccaatggcggggcagattcgtcaatagttgcgccctcctcgaggtcttcatccatctcatcctcgtcctcgtcttcatcttcctccatgtcttcgtcgtcgctttggttgtcctcgtattctacggcacgggcgcgtgctgaggcgagaagagcagccatagggttcgaatcattgccctcggcatccatatcatcatccataatatcgttctcatcgatgtcgacagccgcggtgccagtcgcgggcaggtcttcagtcttgcgggtttgtgctgcctctcgaatacgtttttgctcctcggccttcatgcgctttcgctcttcaatgtcatggagaagcttgtccttgccggggaagagattaggaatgccggggtccttcttaagttttgaccgccattcagggttctgcaaagaacatagtcagaaacttcgatcagaaccatcacgcggatattgtctgtagtaccttctttgcgagcttcttttgctttctcgccttctgaacagcagacttttcaatcttatgcctcaggcggacgggaacccgcttggaagtcttgcctgtagaccgttagaattgcgcctcagaaccgcatgagcgagaggtgaaagagtatcataccaaagccgctcttagtaaccattttcaatgcacgtatttgttgatcgcaaagaaaagtgcacagcaaaccctcaaagtctgtccgtaacgggagtagaaaaagttgagtgccaagatttcccagccgataagcggattattagttgggccgatctccgataattttcaaatgacgatgactaagcatgcgggacagttgctaaattaggtacatacccgactcagtggaggcatcggggataagcaagaaatatattatttgatgacaccttatcctccattatcctcccttggaattctggttcctcttactgttgatatttaacacaaaattatcaacaggctgcttcttgtttttcacaaaatcggcttctctttctactcactattgactccgcgcgcattcaagtctccccgcatcccccaccatgtcctcagcaacaggaacgttctctgcgcctgcgcaagtccacacattcgatggtcttctttctgacttcgatggcacaattgtggactcgactgatggtattcgatccctattcaagtcctcctaagatcaattggaaccaatactgattatccggtactgaatagccattgtgaagcactggcacaagtgagtcataaacacccaacatgaccgccgcgcaaactatctaacatgaattccgcttcagatttggcaacgatctcggcgtcgaccccaagattatcctcgcgacctcgcatggccgccgcagcatcgacgtaatgggtatatacgacccaaccaaggccaactgggactgtacgtatattggattctaaacccccaaaccgatcgctatcttccgatataagcaaaggatataaactgacaatatttcctcgccacagatatcaatgaagtcgaaggccgcatcccgaaggaatatggctccgacgccgtcgagatccctggtggccgcgacctcctagcagccctcgagacctccggcgcaagatggggtgttgtaacatctggcacgcgccctctagtccacggctggctggaagtgctcggcctcccgcaccccaagaacctggtgacagcaatggatgtgccgctcggcaagccggacccacgctgctacctgctaggtcgggagcagcttgagatcgaacattcaacatctattgtcgtacttgaggatgcaccgtctggtatcctggctggtaaggctgcagggttcaaagtgattgcgttgaagacgacgcattcgctggagcagctccaggaggctggcgcagattggattgtggaggatttgaggagcatttcggtcaagggggttgttgatggccaggtgcagatcgagatcaagaatgcgtatcaataggtggttgttgccatctcagttgcgccgattcgctgctgcatgggcagggatgtgctctttcatccacagctgcgtgacgagtttctttggggttggatgcacagcctaggcgtctcatggtaaagatgtcatgactttttatagaattaacgtgcactacatacacgttggattgttagatatatattcaaattttctagactttttttatcaaaccaagatttgtcttattagcgcagcagtcagttttgtcttgctagaggacttatacactagcaaatgaccacaatttgttcgtattcttctgaaaaacgaggatcacagttggtggtgttgaaaaacgatacctatactagagaggcaacccggattccagctgctgtctcagaccatgtaactggccaattgggcttttgagtaggaccgaatgctccccgaccacaagaactaggctctacatatcccgaaacggtacaaagataagaggtcccgaagtagctcaggtggttccccggccggggatgtaatcgggccaggcaaggtgcaaatgcaagatagaatgtactatgcacgagttccacatacaacccaccatgtgtaggtagttagaagcaggtatggagctcactctagcctcgcacacgaatcagcggtgctatcgccgttgcaataagtacggacgcatttaatgacagcagacatgtctcataacaaggatggcggctagtctagatgattcgaccggcaaggatcaaaccgtatagctgttgacatggtaactggacgccctagactaccatggcgtggcggacacctttcgtggttatgcagctacgcaatccttgcagctcgaagccggatttcttcagcagggcgttgcagcatgcaaatgtacctgctactcccgtctgatccaatcaatcaggcagggcgagccgcaaactaccgttcatgtacgcttgagccctcgatggatgtggaaccaggccatgagcgcggaagtgcatccccgaggggaatgacttcaggattgggaaaacaataccagatctgcttttattggagctgggcgttctggctgcagccatagagggttcagcagctgcacctagctctttcggggaaaggattagatgctcacgaggatatgactgcttttcctcccggcaactttggaacaaaatcattgtgtgaatgccattggtgggccaattggttctggggtggacacatcctacctgactgggggagcttggagcgagagccaactctctccaatggtgtcgaggaagcccactcggccggtgagaacagcatgcaaggggcctaggtcattccgctcatgggtcgggaagaggtgatgttcgaatgcagacctggatatcatcacaattaaccgaaccaagaaaggcgatatgggagagcagtctcgctctaaatttgagggattccttgtccatgaccctattacattgaactctgtatgaggatgtgtgatgacgcatgaggggcatgcaatctcatcacatacagcagatttgtcctaattcagatctggactatagccttgggatgcaccgggttggggggcgtgtccaatcatggtgcagaccgttcctcttgtggctagtttttgtagattattctgcttattctgcgagctcgagcactggtcccccgaaactgacaaatacataatgccaaggttatagttatgcagggcgctcgatatagttgcgcaccgccacaggcatttggtcagcgccacaagggattctcgaggacggatctatcacattgacagatctgcacggctgagccacctggcttctggcaaccgaaatactccgagcccctaaaatatcgtggttgacgagtcgagaaaagcactaagccatgcgccgccatggataggggtttgatatcataatcggagggtggaggacggtccgacctcggccccaattgaccgtcaatctatgaaggtttgagaccgaggaatatttcattttgctatcccactgtcgatcacatcaatttttcccggagaattgtgtcccattgtcttcaattttgcacactcgggcagtgtgtggttgttgttgcaagcccgatatttgagattgtgatttcggtgatgggaggggatccgtgcgggaacttggaaatacgttacggatcgatccaggggtcccgaggtcgtcatggtagatcccccgaacttttactacgaagtcgatctctgtgcaacattgctgaaatagcctaaatatgtactcaagtacgagaatggggcttgttatacggagtacttggaactccgtactccatatgttactgcattaaaggcgtagagaacatcagagatcggggcctctcggccaggctagagtaatatcaaactggtccatctctacgctgctcggattcgtctatgatgtagtgtactccccatgaactcggaccatgagaccatttcgtgagtgggttggtggggcatgatgtgccaaggcgaaagtgagcacaatcgcccaaaggaaggggtcgtgaagctgtcgggagtatcatcgggtgtgatgtgcgccgatacgcgccttcatgcacagaagcgtggacgggaacccgatttataagtttctacatcgtcacaagcacgtccatcgcagaattactgctgaagagccatagccaggtatcgatacaaagtttgaggggatcgaaaagccacgttgtgtacggatactctcgtatgatctacccactccgtggagctgctagtaccgtctcaaacaaggtctttgctctggatttttctccggagcgatacctcggtgtcaatcactccaccatagtcttctaatctatgactggctgaccgagcatgatcaacctaggatcactatagcgttggggtattttgggtcagatcatgctaccagatagagcagtcaaaaggtagatcactaaatcgaggaggggtgctcttgtggcttacagctagagcagaggttccgctaggccggttcattgttgccttattctctggtgctactatccatgtgtcgacgaggtcatagttcgggttcgctatacggtaggaggacaggcgttcggggatctctcgactccatagtttgagattcgtcgcccagggatctcgagtgtttgactgtcaattgttctgaacagctgaggtgaaagattctgagatgccccatggtagagtactatctacaatgtcctccgtataatggaactgcctacttaccaaaccaaacgtagaatgaaacaaagttgagacgaaaggttaccatagcgtcaaggacagcccagcagttaccggatgttcgggcagtgatcatctttaggcgcatgtgcatgttaagggggtggacaaagttggggctgcaatcctcgtgacttgcgtgcatagaacgtcttattccagacgtttagcgcttgtacaacatagagcagctccaaccagaatcccgggaaaaggcaagatggtgtcacatacgtcgaatatggttggagcctggaaaaagccgaataacagggggcacaagatatgtgctcagagagggggcgccacatccaaagaaagagataaagaaaaaaagctcggcagatccttgagtgatcgacgggggatctgtcgactattgatgtttagtttgtcttggctgactgccatgctcccgcactaggatggattggtgctagtggaaagggggagactgtcagttacagatagctgacacctggttgcttcaggagtcactagtctacggagtcactattatacaatgtgcctttgtagatagagtagacatcatcatcatcgctctccatgatcgtgacgatcctcgaatcaaacaaccgtattgtatcggggacctgcccgatcgtctgacccagagcaccggtctccattcaccccggtacgagggaacgcctaggactcgaccgggatgtttagggaggaaatgtgactgttacctaaagcagattgattagttatgcaagtccgatcacccacgggtacggaattccgtaccgatgtctagttacaacttgacgacgtcttacgtgtaactactccgtagggctatgaacatacagcattgtactcctacggcattatcgcacgtaattcggtacttactagcagatccactggtgtttctttccaaattaaattcttctatagtggacatgattttctttgcagcgacgggcacctcctgggatcggacatgacgctaatgcaggaactgggattttttgcgtttgtgtttttttggtttgtggaattcgcgggacacgaaatggtggtcctcaagccgtgaagagatcttacaggaggtgtatcccgtcgtatatcggtattttaaatcctataaaataccgcgggaggcatccgacccaaactcggctctccgcatctgaaccctggctcacctttgtttaatccgaagcttactagtataaggtacactaggtacatagttataggtaattccggtgctgtggcaggtatggaatagaaacaacgattcatacgagatcggactctatggcgcctcgtatgctatgctatttttcagtcacacgtccatgttgaaataggttcacgaggggggagtctggacgggatcggaattatgttatgggccaactctattctggaaacagaccaaaataaaaaaaataaaaggataaaggatacatcgtagagaataagaataaaatccaggatattaaaaaatcaaatccaaatgtgactctgatgcagtcaggccgccaccccctaccgagcgggcggtagcgcgactccacgggctaaaaaaggatgaaatacggtgggggtggtaattcggctttcaattcgtggatggttggagaagcagacgatccccgatctgaattgcttttcattgcgattccttttccaggatttattcgaatttgtatttaaaatcttatttcgatataattgagaatataatttcgatttgctatactcgatccaagtataggtacccgccccccgggtactgatagcacacaagtctcatgtacccagtacaggcacagacctttgcaaggctgtttcatctgattccccgttactgaacaatacccacccaccacccaatcataccacactgttcggcagctctgtacggcgctttaccagccgtcacccccgatcttcccagcgcctcatctttctttctcttcatccttttccttcccagtctttcctttacgtgactttttttgctttttttgctttctttttccatacacactcttttgggtccctaattcccgagtctctccttaatatcgactattatcacaagctaccgctgctcatttctttttcttgacggactacccgtactgccactctttacatttacaatcaaggtccctgccgttcccatcagaggttgaaccaacccgaatctacttcatgatatagacctcgttcctcgaacctgccactctcttgtgcagccccattcccgtctctatctctcttgcgcccccacggcttcttctcccctatacttgcccactctttgctcccgatcatcatgagctatattcacccctcatggaactaccagggtcaccagggtatcccaatggaccaacacatggcatacgacccgtccatggtccctccgccgatgatgcaccctatggatggctatatgtatcaccacccgccaatggagatgatcgactactaccaccaaccgattatggactacgacgaatataccgaaaatctgtcacgaccgcggttgaccaaggaacaagttgaaaccctagaggctcaattccaggctcatccgaaaccaagcagcaacgttaagcgtcaattggcggctcagacaaacttgagtctgcctcgcgttgcagtatgtgaaatagaggctataaccttccgatctacagagagctaatcgaatgaatagaactggtttcagaatcgtcgcgcaaaggccaagcaacagaaacgccaggaggaatttgaaaagatgacgaaggccaaggccgaggccgaggaggctgctcgccggaaatcagagaccttggaccaactgtcgggatcccgaaaaggatcaattgcgaaggaggagtcggagagatccgctactcctaagcaaacacctacctccacgtccagcggtcatgccaagacagattctacatccagccgttccaagcaccacaaaacaaagagcgagtcggcaagagaagcaactttcgcatctctgcagagggcgctgaatgctgcctgtgctgcccgggatcgattcggtcgccggattaacccccggagcaagaatgagtccgttcccgaagaagaagacgaagaagagacagtgtcccctggctcaatgccaccaccgaagacgaccactccagctagtgatcatgggaaccttgccaacataaacacttccttttcaggttggtctggtatcaaggaagaaccttcctggggatctggcgggcacaatgagaatatgggatacaacacagagcagacctcatattccgcttgccaccaatcaatggcagagatgtcaaatcacccccactctatgcatcagaacttggacgtctactcgaaccacctaacccctcacagggacgagtggtctcaggacagcaacccacgacacgaacaacttgtctacagcaacatgcaatatccaatgtccatgcaggcaccagatatctccgtcacacgtcgtgagtcttctgatgcgctgactgcctcactggagggcattggaatctgtaccggccaatctgggatgtctcaatccgtcgatcgagcagacgggatttggaaggaacccggcaaggagcttgatctcgccgcacgccgcaagcgccctcgtcccgctgccattggcacttcgggaactcgtcccttggccaactcgacctcgatgtcctcgctctcgcctaccgctcgtatgcctaatcacagtgctggcaactcgatgagacaatccaagtcaactcagagcctcaactcccggtatgcaggcgtgaggaaggcatcggctgcccagcgctctccactcaacttcacttttgcggattctggttctatcaagaaggccgagcagatgctgcgaccctcgctctcgaccactagcctagctccacccactcccttgactccgcaagacctccagaatttcatgcctgcctcccccgcggatagcaactactgcatgtcggcccactccacagcccacttcttccctacttctcaacccatgcaggtcaacatggcatcacctcctgctacgccaatggatatttactctcccttcccttatcaaaacgttgctccccctatgtcagctccggctcacgtctcttccttccccgagtatatcacatgtgactcgattcccatcccaccccgcagctgggccgacactgcttccatatcttcgcccgagtacccggctggtctccaggtgcattcaaccactgtctcgcccatgggctataacgcgaccaccgaccataccgggcaggcctttggaatggaatcggtctctggatctccgtctttgatctattcgattgaagataccgatatgccaggctctgcagagctcgcggagaggaagcggactgaattcatgatgcacgaattcccagagcacgatctccagtatggtggccatcacttgccatcgatgcagaagccgaaagcctacacgttcgcaaacaacacgacaccaagtaactacccttcctaagtgaaggttcattgatctttcccttaccatggatgtatgagcaatgcgcgacaacttttggtgtttttggtctactacaaaaatttctgccttcaccttcgttttcctacactttccctcggggagatgttgtatacccaaccctccgtgcgcgaagaagcactgtcactttatgtctcctatatactattttccttttcgtgtctctttatttggggtgtattcaccgggtttttacatatttggagcattccttgcatgttgtttattggcctaggagtgtttttgttattttggtgtctgataggaccttttaatttctgccgagcttcctcccgggaacttcgagacctcttttaccttctacctttgtctactcttttttattcctgttggaatcggttttgtggattggatttgaacttgggtttgcatatggctttggcagcatctggctttgatattttccacgatatatacacttgttatgtatctacactatctcatatttctcaatcaaatcaaaaaggggttgatctcttgcattttggcatttacccgaaataaacccgatcaaccagcagacggtcagggcttggctattaggccaagccatcggtgtcttgccctttttatattgtagctcgctcatccgagtactttgggatatactccgaaggtacactgatgtcgtacaataatggatccagcacgtgcgccagaccataggttgtggtgtccggaaccttggaacgcggaaaagcgcccctggaactcaccgtaaccttaactaccacgtgcgctacagtctctcaaggttcgtacctgtgtataaaaggagcatatttgtcgatcttatcccaagagccagaataaatttgtgtacatatttggacgttggaattgaaacccgtgtatctccgtccgatgagactatccaccctcggcacagcccttgtgggcctagctgccgcgcaggcatcaattatcaattactccgcggtcacaggctacttcctgcaagatgaggcttcgactgatgcctctacatttgactatgtaagtgaacaaataccggcgaattatagcagaaacaatctcttcgtcgacgccttattattcggtccgctgacatgttcagacagcggagaacttcggcctgatcgcccgctcatatcccgcagacaagaatcacaagaagcacgaatctctgacccaatgggaacgcttctaccgccaggtcactgcgttgaatgatcattcccccaaggacgtcgagtacaaggttctgttccttggtcgacatggcgaaggatggcacaatgccgccgagacctactacggaacgccagcgtggaacgtaagtccctacctatgaaccaccttaacgttacaccaggcccaatctcaccacctccattcagtgctactggtccgagctcagcggcaacagcacagcaagctgggcagacgccacactcacacccgacggcatctcgcaagcgctcaaagcaaacgagttctggcaaaaggagatcgatgaacaacgaatccacaccccagaccaatactacgtcagcccgctgacacgcaccctgcaaaccgccaatctaaccttcacgggcctggacctccccagacacagcgcgcccttcaagcctaccatcaaggagctcttgcgcgaagggatcagcatccacacctgcgaccaccgccgcagtcgcagctacatccacaagctattcccgcactggtccattgagcacgggttcagcgaggaggacgagctgtggaacggcgtgacggccgagtcgagcggcgcgcaggatatcaggagcgcccaggtcctaggtgaagtgttctccgcttcgcccaagtcgaagacgtttgtgtcgatcacgtcgcattcgggtgaaatcgcctcgattctgagggttattgggcaccggactttcaagctgaataccggtgctgttattcctgtgttggtcaaggctgagaaggttcgcggtaaggcgtcgactacctctgtgccttgggaggtgagtccgcattgtacggagccgccggttacgtcggttacggcttgtgtttgtccttccagtgcggtgcctgttacgacggctttggctactggattttagagtggctttcttggctgggttgggtgtgtctaatggttttgcttgtacagacccgatgtaccagcgaagcaatttgtgatggtatttgttacaaataacgggctgcttaggactccttccaatgttgacggcgtggttcgataatctggtccataggcttaagatggtacaaaggatacccaaacccgtatgtaatattcaagattcctttctctatagtatctttcggacaatctactttgagggccttaaataatatctttttgatctctttctattctcttgttgatattttagatgtcgccccctctcctctattcgtactgccgcttgtgcggtgaaaaaaaaggtgtaatatcacacacaacatgataggttagatgctaagcaaaaaaagacttttaacaaaaagaaacgtccccgggaaggcttgaacttccaacctcccgattaacagtcggacgcgctaaccaattgcgccacggagacttgattgtggcagaggtcaataggaatggcattatgagcatgttttaatgcaatcgattttatagagtgtgaacagatcatagctggtacttaattaccccccttactattgacctatgagtaacgtgtgagtaacgtataagtaacggctaagtaatgtttaagtaatttctaagtaacgtacaagtaactaacgtgcaagtaatgcgtaagtaacggctaagtaacgcgtaagtaaagtctagttgagcaaccaacgtctaagtaactaacctataagtaacgcgtaagtaacgtctagttaggcaacttctaagtaacgcctaagtaacgtctaagtaatgtataatagaggcttggaattttatgaggctccggaagcttcaaaggttctttctccacataactatgcgccttaccgtgattagtcatcttttagagtttttgacatacggtatagccctaggtcgctcgaaagtcgctatatatcatgctagtactatacctcccatactctttcgacgttgatatacttcaccactatatctcctcatcaccgcgcgtttatgatgtcgtttcccacaattgaaaggatggcagccatcacaaggctggtacatcagcacctttcttccctttcttccctttcaatctaccataacaagcttgtatccatcaaacaatccttgttttgtctctgtgaagcatctattgtgcacttgttgtgaattctgacacttgttatattgttcctatcttttcgggttcaattacagcaatggatccatctcaggctcaaagcctgcccgtgtcgcagctgtctgccgtgaccttgaccacgtcgccctcggattcactggctgtggtggccttaaacgggtcgcccactcagcagcctctaagtgatgctcctactgacatctacccttcgccgactcctcgtgatgacgcacagtctaatctgggacgagagtcatcgctcccacctgaaattttggaaatggtaagtaacccattgagccaagccaatgcagcctaggtctcttcggccagctaaccttgtctcagatcttttatgccgtacttgaaagtcctcccgcgtttgaggaatacgacttcatttatggggatgtcttcgacagcccggcgaccaaggaggctctttcgactttcagactggtgaaccgggcctggaacttcgttgcaactcctctccttttccgaaagatccaggccatgatcggatgctctactattcgaccccttgataaaatcctaatgatttctcaaagtccatacgctctttacgtacgcgacgtgcactttggtctcttgggaatatggctgcccggactgggttatgatcagtacatcgaggatctggcagaaggaattcttccgctcctgatgagtcgtttcaagaacgtccaaacattccggttgcaagcaccccccttggtagactcattcagcccattagcactgctcatgccggatatgcttgccaagctgacaaattcttttgtgcatactttgcgctttatacctgtcccgagactgagatgccttcatttgtctctgccaactacggcggaatttgctcgtttcttaacgacgtactcatactccaagagcttcgccgaaatttgtgccggaatcgaagagctacacatcatcatcaatgacagcaccggccttggtgtcagggcaaccccgagacgacctcgctcattaatcgaggccgggtttctaatcgggcaatttaccccgtatctcgtcctactcatctctcatgcaaaacggatccaagtcctcagcttgaatgcttatagctggcttgatctatccgatctgcaagcagggagtttctctcaacttagaagcctccggctcgaaggtgtgcaggtcaagcccgagactctccatcagattttcatagaagctcggaatacgctgcttcgcgttgaattgatcgatgttaagctcctggccggtacctggtctgaagtttttgatgttttccaatcttctcgattgcttcctccccctaacctcaactggcttcatatttctggatgtggctacgccatgaccggccaatacactactcgtggattctcggaagtccgacaagcactctggtccacccgtggccaggactggattggtcttatagcctggatggcgatgacgaataacaaccgtagtttccagggattgcctccatgtccgcattcttacttcccgactcccccagtcatcaccatcgactattagtcggatgcattgggagtcggatttacagaacaaagaggtcacaggggggggcatcatgatttgtaactgctgttctggtttctggtgtctgggcttactgccggtagacctcgcttggggttttcccttgctggggtgtctacccggtgagtaactgctgtccattcttctctgcctggttgtttcaatctccaggagaggtatgtaagattatttgtcgattctgcgtctggtcgtcttgacctccaggcgtagcaaatgtaatttacgatttctttttccttcctttttctggagtgattcttttcctttcctagtctgatttctgggtatgcggtatcgtagtatattgtaaaattgcgagaagctagtcaacctctgagttagttagtaaattagttagtcttgcacccatgcttgaataattagttggtgacttgtgctttgcggagtagcatgcctctacaccctttcacttgtgggcgcatctccccagtttcaatgtctgaagaaatttaggttttcatggtttcacgtcgtttcgtcttttcttcgtttttgcccttctcccttgtggctacgagaataatattgaaactcccaaccctgatcccttagctttggttcatatagcataaaagtcggtcgctcttcatcaaataagtctccgtggcgcaattggttagcgcgtccgactgttaatcgggaggttggaagttcaagccttcccggggacgtttgttttttgattttgaatcaaatccagttatctcatttgcaaggggacattcttgcttctgtcttgttttttagggttaattttttgggggttctagtcagatagggtgaggttggtttaaactcagtcgtcgaactttatttattgtactgctcaattgtatccatgggtgtatcgtacatacatagcccttctttatctagtgcatcatttatttggccgacaataaaacgagctatatgcagtccctagtatctcggtcatcttcgagaagtaggaggaactactacttgatgttagcgaggtctattcatatcaaagacaggaactaattgtgactactacgtggtccatggccatattctgacgacaggttatctcgcttcatgggctgaatagaccagttatgtatcactctactctttattgggacagttatagctccagacatttggaggcatcggtgtttgggggtggagatgcttagttgatgttaaagtgttgtacgaaaacagctatctagccggttggtctatggtatttacattacagtttttcataaaatacttgacatgtatatgtagatcttattcccttcagataacaatggatatctataatgccaactcgtgggttgttctggtttggacgggattgtatggtttgcgtcgtcgtgatgataagcaacccagcgcagatgtgatccttgggttgattatgtgtgagtaaatgtccgggttgtaggattgggtggcactggatttgaagttcgcaggcctgggtcaatcttgtgactccgggaagtgtgtatgtctgatggatgtctagttgattgtagagttcgagactctcgatggctgtttcctgtcgcgttgcggggatatgtcatctccatctatggtgtttgctatgtttattctgtgtttatctatgtagcaactggtggccagagcgaacaagttcgaggcatggtcggacgaagtagcgctgtgacatatatatatcatcgccgaaataacaacatctcaaattaaaatataccctttgttttggtgtttcagctggggaatgaagagatatatatttgatgagatcttcgaattacttgatccctgttggacaaaggaatttggattaatatgtgcatgataatatactacgatattaggactgcttgctgtgtacgacaagcatgagctttttataattccactgtctcatgtctatttcatgaaacaagtctccgtggcgcaattggttagcgcgtccgactgttaatcgggaggttggaagttcaagccttcccggggacgtttctttttgttaaaagtctttttttgcttagcatctaacctatcatgttgtgtgtgatattacaccttttttttcaccgcacaagcggcagtacgaatagaggagagggggcgacatctaaaatatcaacaagagaatagaaagagatcaaaaagatattatttaaggccctcaaagtagattgtccgaaagatactatagagaaaggaatcttgaatattacatacgggtttgggtatcctttgtaccatcttaagcctatggaccagattatcgaaccacgccgtcaacattggaaggagtcctaagcagcccgttatttgtaacaaataccatcacaaattgcttcgctggtacatcgggtctgtacaagcaaaaccattagatgtatttttttttatgcttccatccatctcttttcgcgctattataagacaatagacagagaaaaataatttatatttttacatgttgtattagttcaaccaaatagaacagaggataaaaactaggatagcggctgcagcgaataatcattgatatgtatggccatccacctcgcaactacaagaacagtcgcgaccaatatggaaccagtcaaagctagatatcaatggagaaaaaaaaagtagggttgaaataccatatcaactggaatcaccagaagaaataaagtatggagagtagaagaaaccaagtagagaagagaaactgtcatctgacaggtacatgtatgtaatcgcaaaataagaacgaggccataaacattgatacatatgtaggcgagaacatctgggtttaaacaaggatagaactcaaatacacagggaaagcagatgccagcgaacaaggatcacacttctctgaacagctaagcgaccatcagacatctcgccaaggcaaaagaaaactagaccgtccacagtgattcaccctctattcatgtataagtaatagaacgaaaacacacatactcataatcctgtaacactctgtccaaaagggtagaataaacgccgagcataaggacccaacgccagtaaaggcataccaagaaaacaagaataagtaaacaaaggaacaggaacctcgaccaagaacaactcaacaaagggtataggaaggttggcccagattaacattaaccgaacatccttcaccatggaatgcagtgaagaatgcagtggaacattggaataggagaaaatttcaggtatgaatgaaaccatgtgataaaagtagaaaaaaaaaaaatcgagcctcagatgatagtgtaagctggtaagaagtaaaacgcccatctagataacgccagctgtcgcgagctagtacgaccacccaccccctaagggactgccagactggcccggttgaggttgtcctggttgcatcgggccaccaggtccgctaggccacccaggtataccattgcctgccatgttcattgcaagatttgcctgttgagggtttccgcccatgaagggttggccaccatgagcctggttgggtggatacatggctcgtgccatgcccggataaccggtcgggttgactcccggatatcctcccatgccctgcataccctgagcctgcgccacctgcgggtgttgtatttggggatattgctgaggcatctgaggtattgattgtcgctgttgattgcgaggagactggtggtgatgttgctgctgcggatgatgcccgaggggagatgggctttgttgcggagcagacatttgttgaccatactgagacattccaacgccctggtgacctgaagacggcaacggggagggctgtggctgtggaggtggctgcccccaaatctgctgttgttgcggtgaatatccgtatggaggaggctgacccataccgccacccatagatggattgggccgctgttgcatgagattgggctgcatgtttggtgggattctcaggggagactgtccaacggactgtgggtgagcctgctgggggtagtttggttgtccacccatcattggattagactgcatgggaacctgctgagggagcatatgctgcgtatgagcgggattcggcatcccggcagagggaatctgtgatacctgaacgggctgtgacacagacaaacccgattcgagagcggtattagactgggcctccgagaccggggcctcgcggggcttggagtaaaattcatccaagcctttttggcggaaactgcgctgaatgctcaacattttgttgaaatcagacgtgtgttgggcttgattcatgaggtctgctgccgagcttgtttgcgtgcggtcgtggtagggttgcccggtcatttcctggcgtgcacgaggcatgactgtgtaatctcgcagccgggggtcatccgtcgtcgacatatggatcatagggagtggaatcgaagattcagaagtatccagcgagagcccgtgcggcaatggctcgatggcattactgtagacaacatcgttatgaggcagcgccggcaacaggtttgtagctggctctgagacggaaccatcgcgagccttagccgcaccaggacgtttctcacccgcgaggtcatcctccgtgaagccctgctttctagctttggtctcccagtagtcatctcgaacccgacggccattcacaatcacccggctcccaaactgtcggaacatggatctggcagagacaatagcgatttggcgggaccgataggaatatggcaagatatcttgctggataagatcgtctttctcgatttgggaagcaatgattttatgcaacgatcggttcttgttgaacaaaagatacgaatcacgataattcaataccctcgcgcactcagtcgcaagcatgaatagtttgttgccccggaggggaacacggaatgtccggcatttatactcgcggccaccctgcggatatcccataggatctgccttggtctctccagcttcatcaaactctttagggatgtactcatcaccttcttcattgagctggtctgaagtgtgatctctcacagtagggagcgctttgactagggatttcgttggtgtactcttgctgtccggtgatgccagagacggcgacccggcggtggcttgcgacagtgggcgtgcttgcatttggggagtttgaataagcgtgtttgcgatgtgttgttcactagagcttggccgaggcgtctttgggggacgcccgcgcttgcggcgactttgttcctctaaaaaaagagacaatgttagcgtatattgaggtacgcaagctgtgattaggcaaagtgcaagcgctggtgggaatatagcacagttctggatggaacctattgacaatgccttcccgctgccaacgtaccatcgtcctgatccctttcgacatgtccatttcccatgtggtctggagtgcgactacgcttgacaccacgggggcttgctattgcatgggaatgtgctggtagggcaacagagactaggagtatcagtttgaaagcagtgacggggaaggaatacacaaagagacgagtcaatgagtaggaaaatatgattcattccagcaagtagtcccatcgatagaaaacagaacgcgcgcaagaatttgtgattgaggacgaaataggaaatgaacggcacgaggccaagacaagaaatgcgataagacacataccggggttgcttaagttcgcgggatcgatggtccccgaggggccatcaatgacatctaaaccattcattgtagataaggagtgagaagtgccatacatagcgggtcaaaggtcggacggttagagcgcccgtcgcaagatggcgcgtcaagtgaacgcgtaaggtattcgggcagataaggaatggaaagtggcgcaagagagcagaagatgctcatgcaagactttcggacctctaaggtagatcgaattaggtcaagtcgtcaaggagctgccttctaggtaggatctcggatgaacttgggtttgagaggggaaggggatcgaggcggtgaagatgggagcctgagtgttcaggtgttctgcaaccaagaggacatcaacttgttaataatgggatataatcttgcgcaaatcaagattttgatctctttctattatgtctctaccggggagaacttaagtcttgcaggggcaataggaaatagggaaaaaaaagaaaaaaaatagaagaaaacgatcgtctggtgattggtcacgagcaggaacaattaggactcacaagtctgctgctaagaaagtggcaccgaatcagacaaaagctgggctaattcctgcaggttgaatctgttttgggcttggtagaggctaggccaagtcgtttgtcctagagagctccgaaacaagtaaaagatacccacgataatgttggagattagtaattttctccccgggtgatagattgatcggatattgaccggatattggctacgataaaatgatcagatctgaacgaggccggagggaatggtgacctttttgtgatcttctgggcgtcgcgggtacggcgccaatatacgaatagggtcgataagagactaatgagatcatagacggtagcactcagctacagcagaagcatagaaaaatgtagttttccttctccctgactcctttgcctcctacataatccaggacgattttccgaggtagcacagcgatcgaatcctcgatatgggagttgagaaacacggagaaggaccctgcgtcttttgggcaatagcatccagacgtatgcaggaagggcaaaaacagagaaatgaataacgaattaaaaaaatcaaaataaaagaaggtgcaacagtagcacaggagtacaacgcgctttgggtttggattcctaactaggtacagaatacagaagatgtccgcattggagccaatcacgaggtcaatcacatctgaagtattggtattgtccttgtattcataaccacagttttaatatattgttgccgatcgttagatgccaaatatttcgagtatagaccatgggagagggtataaaattacaaataactttgtttgggtgtacctgaatggcctttttcctattccgatttcgagcaaggtctatcacaacatggacagagtctagacactatgatagacctcagatagagccatgatcacatctattcagtctggatcgtgtattgtgtaacttgacgtgtcttaaacagctactgggggtcaaatttatagacgaaagaagcaagacgtgaaaacgaagagtgatgaatatcggacgaagctcacagacaattggctccacagaaaagagacgaaattattgatgattcttgcgtatatgcgtgtttctcagccatgtccactagtgtagtaaacaggatctcaaggtccaatccgaagcaaagcaaccaatatgcgcggtcggattatatcgggtcaagcacgaactagaaatacaaaataagccacctgatactcaaatcgtcctggtcgtctagactcaaaatgtagttcttgttttatgccgacacttaacaagccgggcgataaccggagaaggccatagtgaggggccattagataaaagtaggaagaaggcgagaggaatgtgctcaggccgcatcttgtcagcctaacaggagctaactatcgactagttagacctagtgctttacggatgatgggcggggtatgctcgtgcgagagacttgatttagctcaggattgcttgattcaaatttacccaaaggatacgtgctcatggttctggggatgggagatgctcgcattatagtaatgggctagaaagcctatgatatatggtttataacggggagcgaacggtcgtgattacaatataaataaaagcctcgtgttgggtgtcggtgttttcacagcccagttgaggcatttaattcgccagaggatgggcggatgacctgcagaaggcgctgtagatggaacgggcagggtcatttgagcgggaactccctgattagtcgatcaacgaacggcccatgcgcgacttagaaagagaagctagctcgaaatggctctaatcagcacaatctccaaatcatccatcgtgcacaccctttatgtcattagtatcgcccaaatcggagtaggcttgagcccatatactcggaggcggctgtacgaggtagagcaagatgtagtatcgtcacacaacaacgcccgtcgagacagtcggactgcactatgaagtatattgcgaacgtacaaggttcgaaatggaaaaagcccagatatatgaacgctgtcccaagtctcacagcagcccggtcttgcagagctgccgttctccacgctcggcgccggcttttcttgcccgtcacacaatgactggatctgtgctaggcctaagaacacaaggtgaccttgcagctctaattaggaaagactgaatctctccatcatggacgctcgatttagaccttgagccacctgggtcctttagctaacggacgtagtcgatccatggcccggatgcaacatactttgctaactaacaccttgaacaatggattaacattaacttcgtgaaccatcgactcccgccgagtggcgggtctgttctttgttacgcatatttattgggttatgtacttgctcttaacgccattgacagatacgtacgtcaggtaaagaccctatcaatctcatcgtcaaaaaacatttgaagataaccaacgacgatcgcgataccgccacttcctggtgaaacccaatatatatcgttggcaaacccccacttctatccctacattcctagagacatgcagtggacgcatgcggagcagttgattgatacagatatgcggaggagaacatcattcattgggacaagaaggcattaagaatggcagagtagacatatccaatcgcatctccagcctattgcacttcgactcaatctctgagcgagagcgagttcagaatgttcctcccttgatgcaacatcagaaccgaattgtctccactaagacaacaaaggacaagaatagctctggccaagagttagattctggtagcttactaccgtcgatgagttagaggcgtacgcatatcatgtccctatcctatcgttattctgagtatggtaattccaggaactaccatccatgatctgcgtagaaaagacaggcatatgccgtatcaaaagcacgtgtaagttgtatatacccacgcgtcacaagcaaaaaccaagagccacagtttcctatttaatataatgagcatgcttgacgttgccctgagagttgcgcctccggggccacgcgttgcacagacccgcttctgaagtggctatatcctagctttaaatctatcagctcttttaaagctatgcagaccgatttggctcacaattgtagaattggcaactacatttgtatatgggaatacatagcagtgcttgattcatcctgtataccatggcgcgcagatctataatgtagagcgggcctgatccaaatcccgaaaataaggaaagttctcttagtttggatgtaacaatgaagactggaagtaccatgttactccgagaggctgcgctcatggacttggtaagatactgctggcacagcgattttgagctaggttaagtttgacccactacttcgtagtatgtgacgaatatttaattcaaaggcgcttatgcgatattcatcgtctgagatatcccttctgttgtacggtgtatattctagtaagcccagcaactagcctagttgcagctgtatgctagatacccggagatgagaccttactagggaattgataagcacactctcaaagcccggtcacgtacatgcattagcatgcattagcatgaattagatttgctatttcttttaggctgcaataacaccagcactagtactagccggaagtgctcggcgtagagaactcgtgactcggagatcgagtaagatctgcagggtatgaaacccgctaagcctaaaagaggggtgtttggaagacccatccggtgtggtgcaggagttcctactgggcgtgcagtgtctgagggagttagttacacgattagtttagtaagagtttgcgtgtacatcgtggatgttggatctactagtaagcacattaggaccgtctttgcaatatgtaagtacagtgttttgagcaggagtgtatcgaatacggttgtcagagagaaccaagaagaagcatgtattctagagacctgaactacccaatgtttcccggggatagcatcactagcaaatgcgacactcgggaagacggtcttgctttccttcgcctgcaagaatggctcaatgaagcctttcaaggaaaacgtttcataatcgaactcatccatgacgcctgaataagaactggagggagagaaaaaaggtggagacctacacatcctgaaacagccaggtcgatatggtaggagtcaatgtcattgtagtacaatgtcttctatgtccaaggagcacttgccttgtttcaagaaagaaggaagggaagagagacccagagatgctggtaggacaaccgggccggatccggatccgaaccacggtacggagtagggtaagagtctatcccgagatgctccatcgacgacaataatagtactcgtatattgtacagttgtcagtttgaagtgagcgtgtcagaaatatgcccgaaacagcgcacagaccgaagaaattagcttgaggtttgagtgggcagttgtaatagaatggtagccgacagatttccgcagaacggccggaacgtaagaagagcctcctgagctgtcaattcaaacccgaaggctacaaataacatacacagaagagtctatatcgtatattaagcatttccccgaccttttttgctgtataatacccaaaataggccaagaatagggagaagatctctaaaaagaccaccatcgagcactggagtctcaatgaaaggccattcttgtctatatcaacacagagtaacggctggactgattttggtgtacaactatattgtagcaaggagcggacttgatatccagtgctaaaatgcaataaccttatgttttgaaccgaggatgaaggtgtggggtcgaggttattttgccatgcaaatagggaaactttgccgaacccaatccgtaagaaaccgaggtccatccgagaggcgtaaaacaacaaatcgctcatcatgttaacggggccagtaggatgctattctcgttattccggagtacagcatacggagtactcgtatggagtatcgactggatcgcttatgctcggtcttcgcatggatgatatttgttccggttcgagaggcgatattttgtttcggatgtcctttgttagccgttttacgagtatggctgcagccatgaaacctctagttaactagctgcgaccgtcaaaaggcacgacttggagcagccaattgtccggcgaattattagcttgtaaagcgggtgtgcgaactagtccgaggcgctaaaatattgtggacctcaccaacgtgtgtgagcgggtacagaacttgcttcctaagcgtcctcaagtgtccagcccttgacgagagattctagactttgactttgggcttggtggctgtaatggctttaattatgctggaattagtggggttatctgcggcagatctgaccatctcttccttctcatcaacggtgttgcatctgcaagtttattgtagtcgcctccgtatgttgtactattatttaatttacggaggacgacagttgaccggagagaactccgtatttttcgtccatgcttggcttcctatttgattcaaggcggggctgttgtgaaataggaagtatcggcagggtaataattccactgctttattctgttaaactcagcggagttaatgcactccatcttcgcgcgccacctttttggttttgtccacggaaggagctggtgtaggtttccagcgggggtctggagcattacctccgtcgcacgggcggatgttatgaccaaacaattagggccgtcttcggcggattcgaaagatcgtcaggaggggcatattgaagtgtagtattgtggaatgcttggacttgtcggtgtggatgttctagcattatgggagaagacggtgctcgcacttcttatgtacaccatactaggatacctaacgcagtggaatctctggagttccaaggttgccgggctagggtttgatgagtcacccagcgaaaccgaggaaaccagttcctacctattgtaggtaactatgaagagaagaattaatctgattttatctagccatgttgtatgtatgttgtacgctgagagagaagaaatccgaaagcaattaatatacaaaactgcaaacgggctcaggatgaggggtttcggatttccaaggaaagtaatccgtggggatcgtgagtttccccgtgcaacgctttctattttattctcttttccctgggattagggcgaataagcaagataagctccgcagaagggtctccaccgaaaaattttcgaagcatcaaatgatcaggaaaactggggccactgtgagggtccgaatagccgctactccgggaatttcttttgcccctttttagccttggatgatgaggtgggatggaatggtgatgtgaacaaagggaataaattgtggaaaatattctaaaatgtaattcttcacgaatatctaacttcctggggtagaatagtctaaagagcacgtagccaagtcttaaacaagaagaaaaaagacgagacccatcagagcctggaactcagggaaccggtttcgtgatctggtgacacggcagacccagggcgcttggaccaggttccccattattcttcgagggtataagactcgttgcgcattcccacctttccctagcctttccctttggaacttccccccaggacttctacacattccatctctctaaaaacatctcgggaatcatctctctatcctataacccggtctatgatccccaattaaaacacaatgaatactgccacgcaaagaacacccaagaccccgaaaccaaccgcctccgtgccaattgtccaaaataaacgctggccccccatggcgaaccgaaacgcccttccctacaagctcacccacatctcgaaagagaaactcgcccgtgaagccaccgcaccagaccctgacctgcgccgttgcgtggctcacttccgcctgcactgcgggtccgtctcctggaccgagaatgacatgaagtctcggatcagctcttttgatttcgaagacaccgatgacgaagacgatatggaggagatcaacaccgaactgccggtcctgaaaaacagagctccggccaacgacaatacagtcgaagtcaccgaacaattatcatacaaatcagagcccgtcgctattgcggctaccccggcatcatcaacatcaccagcgtcgcctgaaaatcccgagcatggttttttggaaaagggtcgcaattgtcttgaggcgacctccaaacatctatggacagggggatcttgcatagtttccccaatcgcgggttaacctcgccgccccttcctacattctcgacttgcccaccttttttctctcttgatcctttgcggccgacactacgatattacgacttgatgaccataatgaacacaccaaaataaaccatttgtatataactttacttttcgacaatatgtcattcataattaccaaggaaccttttttttttttgctggacaacctgtttttcttattacaccataaatatcgaataacaacagccttatggcctatggcccattcaaactcggaactatttcctctttcactcttcacttccccaaactcctcactctcactccccacatgaatctattcttggaggttcccaacccagaaggtcaagcgaagtgactcacctgccgcgtcgccccaggtcacatgacacatacccgagaaatgaaaaaaatagaatctgacgatctccaagacgccaagcaataatcgtcaatcctggagaactaacgcaggccccaaacccgagaattgggggctgtggaactatgattttcgccgtggaatccaaaccagccaggaagaattctgtatggtggaaagtcgcagatgcagtggcgaatcacccgccgatcggctcaggtttcatcatagtcatgtcacattctcatattgaacggtcaacataccccggcttcaaatgacatcccattatatccctgccatcgttgacaaaagcacccgccaataaattggtctctatcaaactagtagattaatggcctgacctgacgtcgctatgatcctcccgatcgttgtcttgactgaaattgagttgccagaatgaaaacaagaaacacaaacccttaggccttggcacacaagtcacttcagaacgtcactcacttccccggaacttggtcgctgctcggccgaaagtacatcgaactaaatctgacacccttcttgcatcgacatcgcgacagcacacagcgatctccaggcccgcagagctaccgtgcacgcccgaccagcggatccgcccgattggctggatctattttctctattccccgtagcaaaagtattccttcggtgaactctcggcccgcgagctcgagcacgatcgacgtcaatgttcaaacatccctggtgttgtttatggatgacgctggctggctggatgccgaggatgaacgtgcggacagcggtttcgtggaaagtgggtaggacaatgggcctagtagggccgatgtatatatttgagtttgataagggccttgtgtcgtggtatctagatgcttgagtatcatatgttgtttcttggctatcgggtactaacaacctgagagtgtgtgatgatggattgattcggtcattgagaagtggcatgttatctaaatgtgttggatgggccatttacccggatgtttctatcaatttaggatgtaattgtgttggtcatattgaaatagctaaattgaatcaagcatcactgccataaaggtcaaagagcaagaccccactcgttcagtagtaggtttgtcccctcatggccattcgagtctcaggctggaacatcctccgtgtctcatgtcatgccccagcgccttcggaagcttcatagcagcctccacagaggcgatctggacggtccactacccacggctcagatctaaaactataacgacagtctacctacggtagagatctaaataccccgcaggcccatccccgcagtctgtgacgaaaaaggtcactgttctaaccgagatgacatttccaagtgtttactgcgccacaaaaggtctagatcgcatggatatagttgtatctggggtagtctctcgaaggccgctggcatatatacatatatagtaaggcacggttcgttgcataggaagtatccttattctacgaccactctgtcctagttgagagatcaattgtatctgtattcccaatgtgctggttgatgccgagcctacaatgaagtatgtagtgtgtcgtttgaactttaccgtctttgtatcgatagttcaagttagacctttaggtagcataggagtgtctgagcaagctagcgatcaaatacctctcaagtctcagtagaaagactctagtcatagccaaactatgaggatttactgttgctggtaagtgttagagaccaaaaacccgcagaaagtgagtccaaatgcaatgcatgtccatatgtggcttagctcgaaaatcagtgaatgcccgacacgcatcttcctgccactccaacaacgtccatcaaaccccaactagcaaagatcccaccgattccgcaattcagtatggagagaaaactctcatcgccaatggcacccacattcatggtgtccgcaccaggaaaagccattgtcttcggtgaacatgccgcagtgtatggtaaacccgctattgcggcagctatttctctccgatcgtatctcctcgtcactactctctccaaatctcgacgtaccgtccaactgaatttcagggacattggcttaaaccatacgtgggaaattgacgctctgccatggaacgtcttccaccaacctcccaaaagaaggtcgtactactctgttgtcgagtctctcgactcgcaatttctcgaagctattatgccacacgcagaggccgtgtcaaaagacctcccagagaagcagcgaaaaatccatataaaatccgcaaccgccttcctttacctcttcctctccctcagctcctcggcaagccctgggttcatctacactcttagatctactattccaatcggggccggtctaggcagcagcgctagtgtttgtgtctgcttaagcgcagcgctactcctccagatacgcgcccttgcaggaccccaccctgaccagcctcccaaggaagcagcgatacagatcgagcacatcaatcgctgggcattcgtgggcgagatgtgtatacacggagaccctagcggggtagataatacggtctcggcgggtggaaaggccgtgatgttccaaaggaacgcctccggaccaccatccgtcattcgtctcaccaagttcccgaaactacgactccttctcgtcgacacgcaacaacaacggtccaccggtgtgcaagtagaaaaggtcaaaacactcagcaccaaccaccctgaaataacagagataatcctagacggcattggcaaaattgctacttctgcactggatctgatgtctttggctgatgtttctgactctgacgctctcggacactgggggtccttgattgggatgaaccacgggtttttggtttcgctaggagtctcgcatccccgtctagagcgtattcgtgagcttgtggattatgcgaatattggttggacgaaactcaccggtgctggaggcggtggctgtgctatcacgctgttccgaccagataccgaagataaaaccattgaagaactggagcggaagttcactgcagaaggatttcaaacatatgagactatcctaggtgccgacggagttggggtactttggcctgcggtattccgaaatggcactgatggggaggccgaagagattgatcagaatacgttcgaaaatgccgatggcgttcacggtatcgaccagctggttggagtgggagtgcaagaaaatcgggaaggctggaagttttggacgcgagatgtttctccaagatgaaacagagtcatggtcgaccagcttttacctcttgcaagtgtatggtaagctggattggtgtttctctttatttcggggttcattaatgactgtcattggtctcccacatagtggtcgagtcaccaaatttgtaattcaggtccatatgtacatagaataattatagaatacacaaagtaaataaagggcagtaagtcgtagagtcagtatatctagtgcaacaggaaccgcgtaggtgtctcttgcgattcgagctccaacgagactgactttttcctctttccagggcgatagacgagattcttcaatcctttattgaaattaaggatacacgacacggagttggcgacggtgaaaaccatcaaaaataacgacaaaactgcgaataatgttagggacacccggaaagagttgaaattagtgctctccgcgccgctgtaaattcgaaggaggatgaggataaggaatccaattataacaatcataaagaactagatgactggttagttgcctgaatattacctcgcaatcgagaatccttaccatcatcagtataagcgatttggtcttctcgcgcttgcaaaattgagccgacaggaccagggtcactatcgtgactgggatcaaacaggcattgatgataaaatccatgttttgagcttgaaacacaacaaggaggatttggagttgacttccgaatacgaagaagaaatcgaatttcaggagagtgatataaacctagaagaaatcggtcagtcacaaaacaaagaacatcagcagcatcgcaacaaacctgatatgtaaaataccgacgcttcatctgcaaatccgcactgatgttcttgtatatagaccacgaaaactccgcgcgcaacttccacgtaaaaaaagccatgcacatagtcccgatgcccaaaaacaccgggacaagaatgagctcgacctgatacaatttccgcagacgctcgccgagggcttcatcagccaagctggagatcgtatccttgatctccgtcatctggagaatgccatatgcgaacaggccctgattacagatgcagagaccgaccagctggattgtgttcctccggcgcagcgcgtcatatgacagggccaattcgtatataagcgcaaaaatgtacaggccgaggaatgactgaaggcgcaatcgtccgtttgatatgctgtcgtcgttgaggtcgtcccaaagactcatgagaatccagctaatttccccataagctccatgttaaagaaggggctgatatccgagccgggggggcccctacctttcaattgccactgtcaggaccgtctcggtgatcaccgttgcggagaacgatcgcgtccataatgtgttggggacgtatagtagaggccggctgtggttcggggccttgtgatgttgttcgtcttggttcatgaccggactgagtggtacagaatatgtgcagatgtctgattccttggtcttggaggacttgtcgtaagcatcgtcagatttgggttggaaggtagtttggaaaggcccagagatcatatcaaaattgaggggaatgtggaggttaagcggttcaggctattttcccttttcaggagtttcggtatatcaaaaacatcccaaactaaatacgtctgcctccttcacagtggggcgaccacgtaaggccattttagatcaaagccaaggccgatctagtggtgtcctagttgcaattgacttccactaagctgaaaaacagagaagctacttgtatctttgtatgatgtacaggacttagtcggccgttacacagcctcatgttatttgatagatagccgtgggatattctttacagaataatttttttttaggtattcccccttttgttggtgatatagttagaagggtaagaatattgaaaatatgtgaatcaaaagaagacgcgtatctgggcttgacatgcatgagactaagacataaccttccaggggaaacagcatattgccccatatctgggcaaccttagctcgtgtttcaggtaaactgtactaataatagattgtactaatcacattacgatgtacggggtaaaacatggttacaacataggtacttacatggatctatagcccttggtcaacaatagcacggaatgtctaagtcccttttgtgagaccgggatagaatgtattgtatgagtatgaggatgctaaaataatgcaatgatggggatatatccaaaaagaatgcaacaatgcacgccatgccagtgcttcagccgtattgaactcccaggtgtacccgacaccagtacaaataaaacagaaagaaggagagataacacagcgaagcaaaaaagcatagaaaaaccgcaaaatgcatgattcatgagcacgggcgtgtatgcatcagaaattaggattagaattccatctcgtcatcccagcccagctgcgcgtatatcgatttggattgggatttctcgggagttactggcacaactgcagcacctttgacgggggttcccatgaccgcaggtggggagtgagcgcgaggactctcggcgaccatggcatcaagcgatagagaaaacggcacagcggtgggagtagatatactctgcggtgcctgtcttttgggtggcgtctccatgattgccgaggtgcgagcatgattgagagactggctgaattgtcgagatgatgtcgacaagttttctatgaatgcggacatgtccttagggcgtgaatggttgggggaacctgggactattggttgtgtagatgagcgaggcgctggaaggttgggtaccctgaaaaggcccttgccggaggaggatgatgggcgacgcgcagttatgctatcactctggaaaagtttggaagatggcctagttggagtttcttgaatagctccgtccagatgacttgatcgtggattgtcatgagaattgaaaggatcggagtcagcgccagagaatgagatcgcccgtcgactcgaggacgggatcatggtgggagactcgaaaggagaattttccacaccagcaaatgaccgggatggagccaggctacgaggtagcccgacccccgcgtccttccttcgattgcctcgaggagtcgccatgacctgtacaccttcgccgaacggattgcgcacgggatttcttgacttccttgaaccgctgccacttacaacccgtttcgacgcatcgtctgccagatccttggagacgagctctctgttcggcttccgaagtgcgttaatagcagcatccagctctttcttctggttggccagcatttggacctttctcaatttagtctcatgctgtcgtgctacggcgttaagatcaacctcgcggttttcggtgcgttttgctttctgaatgccaccccggacactgccgctgagaacagtgggcagcaagggttcaatatcgtgcttcgcattatgctgggtcggcgcagtgttggatcgagtcagtcctgggtgccgagcataggacgctgccgctttatcgtccgtaagtactcgctgtaatgtccgtcggggcttcggtgcaggctgttgtcgcttgacttcccccccgggttccacacggcgtgatttactcgaagattgtgtctttttagcagccgaggaaatactgccggataccccgaatttgcgggtgatcagcttgcatttgtccgggagacgcgcagcatagaatggaatgatgacttctgtgcagaagtcacgcaccgcatcgctctcgactttcttgcctgaaagatggttgctactgaaagaagaagcctttgctgtatcggcggccgatgtttcttccattgtcacagcgtgccaaatacacatccgatcgagatggagttcaagaagcatgttcaaatccgttggcttcttaggcttggctttcttcggcgtatcttgcgccccatttacatctttctccttgttagtgctggaagcaatggtgatttccaaccccatgacttccaaaatcagcaggatctgcaattgtgtctcgcggaggcggagatccgaaatctgtttcttagactctgcttcacgcgacgtttcctgtgcaggatattcattcaagattctgtccttccaccacttgtggatgaatccttcctcccctgggtaaaggccattcttccccatcttctttttcttacttttccgcttcttagattttgcgccatcatcagaaagcgcaagagctgcatcgcgaattgccaggggcaatgtttctctgtatttgaggtccattttcttcgtagcgaggatagcctcgcgataggattcgatcaactccgtcgagccatgaggctgttccaagtcacgagcctggaaagcagtccgacagcgtgttaacgggcccttcgcaaagtacgccacagaagtctagaaaatgtcagccgggcaaactcctaatatcgagtagagcaaatcacctttgaaacgtagagagcctgcagatagtgctctctcatcccgtccagccactcctcaggcgactgttgcacatccacaacattggaatcgacaccatcagcatccatagccgcaggtaaatcccccaagccctgaggttcaggaagcaagaaagagcccccttcaacggcatcaaaactcctcgacggagcaagcgaatggctccggtgctctccatcacccacaaaggatgcctcggtatccccgaggtccgactcagacggaccaaagacaaccgcaatatccagcccagcagacctttcactcacctcatcgtcggagaagggctcatcgatctgagcagcctgccaccagtcaaacccatcgggaatagccccggtctcatcgacagcaacgctatctatatccgcagcatcagttccatgccatcccttggccgcaacaactagattgccctcgtgcacccatcgggcgagcttggagagcgagtatattcctctcttcaccctctcaataatgtacaggccaccattgggcactaggcgcactgcgaggacgatcggttccgtctttacgcacaagtcaatttctaacgaggggatgtccgcggtgaaaaggccgccggattgatcgtcggatcgggatgcaggcgtatcgtcgagccacgagaggggcagccttgtgcgggggagggccgtaattggttcgaggatcaagggttcatcagataaagacgccgagtgagcctatacaagttgcggagagtgagcaatagcaaccaatggattgagcgtatgctgagccagttgtaagcatgactcactctaatgacgatggaagaggtagcaagccgtctagaagtatcatctagcagtacttgatcgtctcttttcctcttctttataggtggaggggtcggttcgtggagtttgttcagcgcggatgaactgagcggatctaggacgttggggacaatgcgcgaggccatggtcgcgtctaggaaattgtgggcattctgtaatttgaacgcaagagtcaagtcttatgctaaagcaacaaagcaattgatgttggttgtgcaggtgtcgacaagatcgcgctcgaatcttggcggatctggcgtcacgcgtcgggacgtgtactccgcctggaccaatatgagacacgttaattgatttcgctgaactggtcgactgtttggcctgaaaagaatttcgcctaggtttgagattactttcttacaagatcgagtacgttaagaatacctaaactagtggtatgatagcaagaacaatgtgaaaaaaatgggatgaaatattatgaatctatcgctaatgtttagattagcaggcccaggaccagacgaaagaacttcaggtactctcacagagtagtgtgcagttccctcgaaaccgagagggcatgatcccgcgtggaagcaggaccaaaatctcctcggtaggtaccatggacagtgaggtagagatacggtgttgaagactgtcgctccagaaaaacgccaaaaacttcctttcccagccgatgaaaagtggtatcatgttgaattttgtcttcgccgaaaaggcccgtcatttgcgcgaccatgcagataatgaaacaagagaaattggtctcctagtgggaaccaacttccggattttatgagggttttttatagtctatgctcatcgtgcttcgagttgttgaaaacaaagcaaatcatcacagtcgtcaataattgtccggagtcaccggatcaagcagagcccgcttagaacttgagggtacggggtgactcccaggagaactcctggttagtgaagtggccgttcttggcggtctggtagtagatgggcttggccaagtcgaggtccttcacgatgacaccgggacggagatcaaagttgtcacggatgatctggaccagctcgtcggaggtcttggaggaagtaccgtaggtctcaacgaagatggagaggggctcagcgacaccaatggcgtaggagagctggacgagggcacggcgggcaagcttggcgttgaccaaagacttggcgatccagcgcgcaacgtaggcggcggaacgatcgaccttggagtaatcctttccggagaaagcaccaccaccgtgggcaccccagccaccgtaggtgtcgacgatgatcttacggccagtgagaccggcatcaccctgaggaccaccgatgacaaagcgaccggagggctggatgtggtagacagtgcgatcatcgaggagctcggcggggatgaccttctgaacaatcttctccttaatggtggcacggagctcctcagtggagacatcgtcagtgtgctgggcggagacgacgacagtgtcgacgcgcagaggcttgacggcaccgttgtcgtgggcatactcaatggtaacctgggtcttggtatcggggagcaaccaggggatggagccatcctgacgggcggccttcatggcagcattaagcttgtgggcgaggaggacagtcaagggcagaagctcaggggtctcgtcggtggcatagccgaacatgataccctggtcaccggcaccgagcttctcaagggcctcctcgtagtgaagaccctgagcgatatcgggagactgctgctcaatggcaaccaagacgttacaggtcttgtagtcgaagcccttctcggaggcatcgtaaccgatgtccttgatagcgccacggataatcttctggtagtccaggtgggctttggtggtaatctcaccgaagaccatgatcatacctaatgtgacacgtcagattgagatctggcctgaagtaattatagtgaacctaccggtcttggtggccgtctcgcaagcgaccttggagaggggatcctcagcaaggcaggcatcgaggatagcatcggaaacctgatcactattggggaattaatacactgttacaattggaattgatggtacagagcccatctaataatccactgagggcaaaggtgaaaggttttaggggtataactcacgcaatcttatcggggtgaccctcaccgacagactcggaagtgaagaggaaagtgccgctgtttgcaactgaacccattgtgacggtgtgtggaagaaacagaaaattgacagaaaaggaggcgggggaggaatgaggaatggagagaggagagggaaagggagaaagatatctcggggagggggaaccttggtggggttttgcttttttttccgagttacacaggcggtacccgagaaaacatagtgtgcgtgggcgaaaggcaaggtactgccgaagtaccctctgaatgtcctccgtacacggtacttcctgtcccttgctagcccgcgatcgcgccatctggggcggtgaatatgggcagatcgtctggactgcaattttcttatgacgataagatagaacattctaaagttgaatcttcttggtactttttaacatacaaccatgtccaaatttggtgtcctggtaatgggccctgcgggtgcaggcaagaccaccttcagcaatgcaataatccaacaccttcaaaccacccgccgcagctgtttctacgtgaacctcgaccctgccaacgagacattcgcctacgaaccagatctcgatattcgtgacctgatcactttggaagatgtcatggaagagatgggcctggggccaaacggaggcctcatatactgcttcgagttcctactccagaacctggaattcttatcagaggcattggagccattgagtgaagagtatctgatcatcttcgatatgcccggacaaatcgaactgtacacacacattcccctgctaccaaccctcacaactttcctctcgcgacagggcccgttgaatatcaacatgtgtgctgcctatctactcgaaagcacattcgtcatcgacaaggccaaattcttcgccggtacactcagcgccatgtccgccatgctgatgatggagatgccgcacgttaatattctcagcaagatggaccaaatccgcgatatggtgacgcgccgggaattgaagcgctttaccaacgtggatgtggaattgctgcaagagaaggaggaggacgatctcaccgcaggtgccaacccaatggccgcggaatccttgatgagcggcgggtctttcaagcagctcaaccgagccgtcggacagttgatagatgatttcagtatggtttcgttcctgcaattggatgtttcggatgaggacagcgtcgcggcgatagtgagccacatcgacaatgctatccagtaccatgaggcccaggaaccgagagaacccaaggatgcagtcgaggtggattatgaggattgagggatatcacatatgattactgcatcactgtgacttgcagcgaattctctgcatatacacccccacgaccgaccactctacccaatgccactccctgcagcagcctcgagttttcggcagcggagcagtctgagataaagcgcacttttcatctccgtttgctaatgtacggtcttacgatattggaaaagctttctaacgttcttgtcgcgccggactccacagaatttggggcttcctcgacgtttggaatcaataatacttacgataaaatcatggctgcgactactagagtcagagccaagggctttctacaccacaaatggatattcggtcatatcctcgggtaatagaaatcataatgaaaccaagatgagactaaaatcaatccatgaatatcgtgctctttagaattccaaaaacaagtcgttaatcgctagcccaactcaacgggatgaagtaaagaataggcagacccatcgcgcagtttcatgatataccccaaacagggataccagccgcaaagaaagacatcaacaagccgagaatttcgactcaattcccagcacacaactattccaatctcaccacacgtccacatccaatcccaccgaaaaacctcatccaacagccctataacagaccaaagcaaaccgaagtaccctacctcgggactcccgcataagccgccgcagccatcttagtcttttcctcaaaatcgccgacaaacccacatatcagaccccaaacccacccgacacccctgcccgcattctcaataccaacgttgtagacataccagccaagacctagaaccgagacccagaaaaccagcttgaaagcgagcgcgatccagaacatgacaaggcggtaggcgtagtcgaggatcttgatagagatgaggattatgacggcgaggaggaataaggacattaggtctggcatgacggaggcgtagacggcgaggaacttcgagacgggttcgattatgtatggttgaagcaccattgtccgtaggtgcgagagttttgttgcgagatggtcttgtgctgttgcttggaggtaggcgaatgtcgaatgatggaggactgtttggaggttttctgtgtccgggattattggttagcttttgcggtgtgggatttgtatctatatggctggaaggcaggttaagtaaatacctggtagcaagtccatgatcgcgtattggagtatatttgattgttgaagaggtcaacgagggagagacaggggcagagagagaaagagagaggttcctcgcgtgtcaggtccgtgtttttctttggcttgccgcgctttgtttgagaacctcggctcttggtgacccttgagaatggattttcgagggaatactggtgtgaggcagaggaataacaccctggctttccaacgttcaaaggcgttgtttctttccaaggttgactcgagagcgcttcgtaaggtcttgtgctggagctctttgtttgtagtagagcaatgcgaggtggagggtacgtgaggtgtgttaaaggtcagctgcagcggagactaggagatgttatttctgaaggtatatattccgatgcaatcaatgatgaatggtaggccaagaagcgaatgcgatgtttaagcttgggtgtctaagttgtggcacccagaggatgcaaaccaaacaaacttcacatgtgaagagatgctctactccgtacggagcacaacatacttggatctatagcttcacttatacattgctctcagctaatctcggtatgtttcatgaatattagattcattataaatgatactgtacagtagattagatatttacctgaaaagagacgctttctatatacaagcgcgaccaacaacagtcaaccacgagttcgtgaatgtaaaagacaaaacgctccaagcccaaattggtgaagaggccagcgcggtgccacgcgcatgatctaagatgaaccaaaataaaaacccgggactccgggctaactccaatatattgtactctaccatcgcgggcgatgggagcacaaatgcatatgcagacatggtatagtaagacagtaggaaagggcaaagcgcgagatttgacaaatttacagagcatcgatgagccctctgagggcgtcacgctcagcttggatctcggcaaggagttggcgggtttggcggagagcgtcatctctgccggatgagttagtaaagatgggatgaaaagagataaccatgagataaaacacaagttacatacctgtcagtttgaagctgagccacatcgatctgcgtgcggttcatacgtccaaccacttgctccatctccatatccgcatcacggaggagcttctcgagatccttgactcgtcgctcgaggatttcggattggacaacctgggtcaagggtacaccctcaccgctggtggtctggtccaggcgcggcgagcgagcatcgaatggtgcgttgggcggccgcggggagaggacaagtgtgttacggccgccattcatcatccgagtgagctgcgcatgctggctttccttcagcaaacggagctcgtcctcatgcttgcccatctcttcttccgtgtggttttgggcaaccaaaagaacttcctccagctctctcatgtggttctgcagaatgttgatccgttcaacggagagctgctgatctttgtcacctttatcaatggctgttgctagacgggaatgcagagaagtattggtctgaagctggtaatggactttgctgcccagtgtctcaattcgaataagggaggaagcgagctcctccgaatccgcaacacctgccttagcctccgcttgatctgcttgcaatttctggaatgcagattgcagggaagatgatgtggtcgcgacctcagcaaagccttcttggccggtcatcaactctgcaccagcggcagtgtcctccacaagaagagcgcgcagagagctggtctcctgctcggcacggtccaagtccatcttgagaccagcgaggttcttctcgcattgccacttgccatctagagcatcctcagcgcgcatgcgaagatgattcacctcgtcacgcaggttgcgcacatctctctcatagcctaatttccgtggctgacccgattgctgcgctcgagcaagctccatctcgagcagacgagtgcgcttctcgtactcgcgggcctggtatgcctggcgatcgaggaggctccgcaatgtccggtggaggacatcgcgttgaacctcgatatcgtggaccttgtcaaccaatgattcacgtgtttctggtgatttaccaccgctgttattattcacggagttggatcgagaaagtccacctgagtgagctaagctgctgggcttgcgtgcaacggagctcgatcgtctcactccaaatgccgagtttctgggtgaggccccttcctcagcgattgaagcgaatcgaccaccctgtagctgagccaaagaagcattctcgatttttaaagcttcaatttcctcaatgagcctgttgtcatctcgaagttgatctcgatcatttcgcaattgttccaactctacccgcatggcagtaagtaggtcctcaaagttatctttggattgccgctcttcaagcagcttccgcttggtgttttccaatgcggtctcgagttccttggttttcgacgacaaatcagacgtatccgttctgtcgcgtcgaagctaatgaaggttagcagttggtcacatttgcgccatagtttgtcagccgtacctgttgaacttgagattccaagatttgaacatgcgattctgatgccaagcgctgagaccgctcctcctgtaacttctgcgataattcgaccttgagttgtgctcgttcttggtctgcagctcggcgaatcttttcgatatcttcgctcttcccagcatctgatgcatagcgaacagagctattacccgagtctgagaaatagtcacttgtccgtcgattgatgtccggaccttctaattgtagccgttcgactagatcctccagatccatttcccggcggatagatctcgctagttcggagcttatctctcgtaattcattctcaatgtctgcgatcttggatataaatatattttcctttaaacttgaagaccccattgaggtccgcgctggatgaccatatccattggtcttgggatcgtatggagagccggggttgaaaggaacgtttgctaatggtggcatagggaaatgtgttgctgatcgaccggagtcggagatctcggtgctcgatgattcacctccgggagatgtattattccccttccagccgaagaaggagctgatcttgttcccaggggttctggggttccttggatctcccgcacccattgacattgataccgcacgcgagtctactttgaaatgtagtggaggtggtctgttcatagacatgtgtaatgccatactcgttgcccgtcgtgacgatcgtttcgttagaggaggggatctgaggatcgggatgaatggttcgctatctagacgactgtgcagaggggttccattcatgaactgatgttcgtactcttcgtcaaagtagttggaaccctcgtcttcgtcgtcgtcgtcgtcgtcgtcgtcctcaagcaccgatcttaagtacgaggcggaaccgtggcgggatgcagcggtatcgatgtataggggttgagaatcgttccgtcctcgcgaatatctagagagttgggacagaggcacgcgattagtcttccagactttggagaaacggaatagcatgtgtaggccatatcatgcttgatcggtaggtagcccgggggagaaaaaaggagggtctgccgaaaaacgcgggagaggaaaaaccggggtcatgctggtcgcgtacctattagagttctttggcaccgatatatatgagtctccatccaccgacaaaggggagagtggtgcagtgggaatcgaaatgggtttatctccctcgaacgaaatgggagaggagggatgatcagggcccgaagtcactggaccatcattatgcgggagaggtttcgttcggactggaggagtagttggaggggggttaggactagagaagctctctgaatgggcgggagagccgccaaactctagaggagacgccatgaaacaccctggtccgtatcaaaaaatagccatggatcgacagccgttcatgctgataagcacgggaaagagaatggcaagcgccaatgagacgaccaaaagggtaaggattattctaagaggatatcagacgagaagggaaatgggagaaaaggagaaagtcttggtacacgacaaccccgggcgattggcgcaaaccgcccgtgggttctccatttcagtagcgctggcttcgggacgagtaagcgtgggtggagcacaaggggggctggcgtgggtctggatgtgcatcaattcaattggtacgaatatcatacaatgatgctttggccgataggatcgacatcgcttgagaacctacttcgtatgtaccatgcagcgtggcgatacgcttgacgtccttgatagtccggacctggtaagatgtgtataatatacaatgtactctgtacggagtatatgttgtatagtactatatggagcacggtgataaggtttgaaatatgaaaatagaacattcaatagtgtcaagtgacacaaagaacccccttgagtcgtggagaggagaggagagggagaggttagcccgggtgaatgcttggcgattcaggggtagcctttcagggctgtgggaagtaccgggaatgtacttttatgtcactttccttatctttctcttgaaaagatacctccaagtactttacgtctactttgatgtttgacttggtagccctatacaatctactcagtaactactctgcgtatctgaagttttcactattaggaggctacatttatattagagttgtgtatttcatacggcttgtatataacttcaacggactatggaaactcaatataattgtctgcagtatattaaggggccctccgaagacagtggagataccccttttccccttccctctctcgtacaagcttctcaattttgtggaaaacccaaggccataccctgccagaagaacgtgcacaatccaacacgctaactacggtatgtccaatcaaagtgagacgtcgatcaacacagcgtctcgccagacactcgggccagcgcgtggggccggaatgtgttgcttcaacgggctaagcgcccggcctaaagcacctgttcctgcatcgtgtcacatcaggaagttggccaatgtgattattgtactttgtttggaagaccccgtacggagtccagtccaccgatatgagggttagcactgaagaccccacctagaaagacattactacttactgcaattcatatggattctttccgcggctggaattgattggacaaccatatgttccttgcttcagcttaggacccaaggatccaactctactgtctacatacaacatacaatcccccgtgttgtgaataacggcctagcagtaatcacacactactcttatttgacgttagggccgagaatacggagtactattaggttatacaattattgtgtcaaccccttatcgatctacagggtttattcagggcgttgatgcgactgctcggactcgctctttgttacaccctaaggagataattgtttcactggtacaatatgtggtaacattgaaattagactaaatgttaccatcccgacaaatggaaatatttatatgaggtggcttgatctattgtatgaaattaagggttctaagatgcgtacaacatagggctactccaggggtccaccatagctgtcacagactgagttgacaggacggaggatgtaccatacggagtacggagtacacagcgctaaactgttgtctcagtccacctgcacgtcaaagaaaagttggcttatgcacacccgtttgatccactcccttccagtctagaccatgtctcaacctttgaagctgtctcacattcaaatacttaaatcccagccactgctgttctatcattagaagtagttgggagtgtccgggtccaacggctggctagatgtctcgatgctgcatttacgctgtttcaggggcccttgctgtatgcacatctctagatatgcaacatattggatgcaatatctggcacgtacgcattataggtatggcggtgagcaaacctcggcctcggcgcttccctttaaaatccttcgtgctccctctctttgatcactaattcagactcgtcgcattttccagcttcatccacagtggttgagcattcgacaaggtttgtgcatacggctggacccactgcagacaaaggcgatgggattatcctagccacctcaaaggttttttatggggcatctgttcgccggttctgatgatctggaggatcccgacgagggctcaagcaaaatttacagtcaaaacacttaactaactggcatcctaacaccgatatactcgttctgaaagttcccctgtgaagacattggattgcgtcgaatgatctaaatcaattcgaaaggctaatgcttcacatcgacgaccacaagcactgccgttcgatcattgagagtgagattcatacaacgtgatgatgaactgggcggggtttgaactgttataaggtcttctaagtctattccaccattggtgttcgacacttagtgtgtccttattactatccgtactaattatttttgccctgtgagctaagagaccagtaaacagtaagatataattcaagggcaaaatatcggtaatattatagtagcccaatgctaactactagtaactactggtcccatttactctgtgagcctgcgaccatgtcattcgacaatttcaacatcgagggcaacatgaacaccacgaacatacctttcgccgtgaagcgaggcagtaaattgccatagttgatcgacaagctaaacgaaaagagattaatacggcatttcaaaggcgactagacgttcatggaaattccaccgaccgcggaaagctctcttgaaatccgacctaggagagttagtcttcaagcatctcgagatgaaggcatctagctgacttgcgattatccaccgcttgcttgctcgttccaatgattcagttaccggttgcaatacctcggtcatgtggttgaaatgcttttccagccaggcagctaccgttccagccttctgaagtaaaaagacggccgccaaaggcattttgcttatgctgagaatgtcgtccatacatgtaatgtcacgagtgatgttcaacgccatttctagagctgctatagacgactcccggacattattctgtctgcctgggacgctaccaaggcacatcagccgcttcttatgaagttcaatgagagctctacttccattagcattaaagaaagatatgaccaaggggtgactcacagaagaaggataattatcgctctgtatggtcgctcccaatcctttccagagctattcaaaacgtcgaccgtatgttttcgaatcaatgactcaattctccagaaatcatagtctgtcatttccatcatggagacgggatgaatctcggttaattgtacgacttgctccagaaaatagacagcctctatctgctgagcaaaacctggaatggttgttcccattgcgtcagagagcagctttatttccggatcccagggaccaaccccagtatgattgctccatagctcatcatcaacaggaagttcatgcccgctctgagagctctgaacgagcaaggttcgtccagaactctcatcaaagtgatagaagagtctgtcgagcaagtaaatcgaccaccacacacgcttcctctcttcttcaaaaacagaggagttctggcggagccgatgcaacccagtagcgaatcccaaattgacacagcaagatagcgttgtatatgaatcagagtgcaatccacttccttgctcatatatagctagcagtaatcctgactgcatagtggctaaatgatcttgtcgatatgtatgtaggagcgagaaaatctttttgcataccacatataggggtatgatttcagtaagctgagacagttctgggacatttggcggattcaccagcaaaatatggagaataagggaagccaactcggcacagggctcatctcgcagtgatgcaactctttgtgccaagaagatgggatgaataaagggaagccattggtgcatgcatcgttcgtagcaacctataacattttctaatcgaagattcaggcttgccaagatgtcaaacatgtaggaagtgaaaccaatgtcgatgctcttcttcctgcaggtgccgatgtagggttgatcaaggtagtaaagtgatttgtgaataactaagctccaatggtcatgatcttgagtgcaagtgataggttgtagaggctgatggctaggattttcctgagtagcacaagatgtgtactgacatggaacgttattgcttcgccaatttagccaattgctccgaacaaggttgaatccattatttacctgacacaacggctgcagcccggaatttgccgatcacatttgcgtttctgagaatgacacaagaaacaggcgtttggagcagcactgcctacttgcataatagcaaaaatactcttgaatgggcgggagcttaaggagcgtggattcatgaaaacgccagtaagtagtggataatagtttggcctattagggacaagtacaatataaagcggtgagagcaatactggcagaaccagactcttgttgcgctagtccgctagtgtcggactagcttcccttggcaaatgaagtatgtgatgggctatattgtatgaatccttcaatattatacaattccctaggtcccttaggctgcttatcaatttcaatcataaatctcagtgtggtactcggtgttcggtgttcggtcttattaaaagacaatagatcgtcagctataagtatgctcgctactccgtatacgcccattagttctttgccaaacctcatcatcggatttcccaaactttgcctacccccaagaaacatgagtgtttccgacgtgccttgtgctccatcccttttcatatcccacggtacagggccgtttccgctcttggaccccgaacaggaatcctacagacaactcctccgccgtcacggaagcaagctcgacggtgtcaagggaatcctccttttttcggctcattgggagaccgagactccgcatatatcgggtggcgataatcctggtatcttctacgattatgaagatatgcgggataggctcccgccggcggcgtttgaattccaatatccggcacctggaaatgcgaagttggctacagaagttgccaaccgactgaaagaatgtggatttagtcctactttggatcttcagcgtggatttgaccatgctgtctacgtcccaatgatccttctacgaccgcaggccgatatcccaatcgtccagatgtccattctgaaaggacacgatgaacaagattcaacagagaagaacatcaagctgggacaggcagtggagtgtttccggaatgccggctacgccattgttgggagcggcgggtcgtaccatgacttcgaggctatcgcaaaggcattctttacaaatgagcctgtgccagcaggcacggaacgattcgaaaattttttgaagaatgcggcatccattcctgattcttcccagagagaagtggcgcttcttggatggagggaactccctgctagtcatactgctcatttgaccaactgttcagagcatctaatgcctttcatggttgcggcgggaagtggaggggacattgccggagtgagatttgatatgtatgagtacaagggagctccaatgagtttttataggtggtaaaggaggtcactcagtctgaaggtcgaccttcagacgaagtgtcattcttgtgtaatcacttcttgttacctataggaattatgaatttcgccttttcattaataatctctgtattttgtttccatacacgctgatcgatttttgatctggctagttgcgaagcattgcatgatagctcattcactcccttgggcactttccattatcagcgccctactgtgtggattgaatacatggaggtactacctggatacgacggctaaagacagagacattgcagatagctacatgtatttcttatgacaaacacttctatcctttctcacctccttcccgaattccatccatgaacctattcctctattgattgctcttcccacgaagtacaggcttatactcattttcaatgaaaataaagtgcgcaaggcccgaacttcgatttggatgataacggaaatgccacatggatattcccctccttcggtcagtgaccctcccgcagctgcccctcaccgagctaaactacggcagcgtggcacttacttgccgaggaacactagattagccacgttcatgattgacatgaagagccaaatcaagacggctagaatcattgtgtaccacgagttggtcatcttgacaccttcgggttcgagctcggctccctctccaattacctggtccgcatcgctctcgtcatccctgcccgccatgcgccagcgcgctttgccgggataggccgtcatgtatttatcgcggcaggtaaagtagatcagcggcgcggtaacaaatggaagtatgatactcagcgctacttgcgacccattgagtgctgcattaagcccttcgcgacccacggctcccgcgatgacgatgctcggtgtgatactgatggtgcgggttatgaggcggcgtagccacggcttcatcttccagttcagcgcgccctcgctgaccatctggccggcgatggtgcagacgattcctgctgatactcccgacagcaacaatgccagagcgaatatgatacctgccgcgggcgaaatggacttggaaagcagatcgtgaataccaaagatgtcggcctcgagggcaagtgggttttgatatagcgcggcaccagcaacgatgagaatggcggagttgacaaagagggcgaacgtgaagagcgaaatggccagctcgagaatcgatactgtcagcgagtgcttaattgcgcctaaggacgggacatagtagccgttgtcgataccatcatctagaacggtatatcccgacgcgagctgacgaggcaaaagcctacttcgctcatcgtattcgcgtaggcggggttgaacaattcccgaccctaggtacagactgtgaggcatgactgttgcgccaagaattccacaggcctgatagatactggaaaagcatgagagtgagataaggggacagcggggaattttggactcacgcttccgactcgatgagatattttgacggaatataacccttgaaaacctcccccggggtagcgccatggatcatagacatttggatgcaaaaacacacgaccacggcgagaaccaagcaaatgataaacatttcaaagtaccgtagacccttcatagacccttccgggtggtagaaaaacagggttaccatgacatcgaggatggaaatagcgcatcctgcgaccagcggtaccttagggatcagaaggttcaatgcaatggcaaatccaatcacctggtcagttagcacttgtagacgcacaatatacaaaacggggagtgaatcaggggtctacctctgctatatcggtggcaataatggcagcctcggcaaaggcgtacaggatgtagttgagccagcgcgggagaaacgcgcgacatgcctcggcgaggttcagaccactgacggtgccgagcttgattgccaggctctggaggaaaatagcaaacaagttggacaggagaacgatgaacaatagacggaagcggtacgaggctcctgcggcaatgtcggtcgagtaattgcccggatcaactaggtgcaggcatgtaagtgaggtgaaggggaaggttgcgggacgacagcattctggacatactgtacgcaaccgaaatcataaagcccggcccgatgaaggagccaaaggtagcgagcatcttccgggcgcgctggatcagcgtgcccgggtcggcgtcaccaccagctgaagctggaggagaacccgaggggtgggcggctgcaggtgtctgcagaccaccctcagtggactggccgcgatcaattgatcgctgagccagccggtaggtggccttgccgtggccgtcgctttcggtaggagcatcactggctatttgacctgggacattcgaggccgcatttgacactgcgttagtgtcgctttctcgaacggcccgaatgttgacgaggccgttgaagtcctcgttggtggtcaggtcactggagtttgggttcgggctttggttgtagccgtcaccctcgaggggctcctcggtgtgggatgtcttgttcattccgttgacaactgccgcagaatatgacttgttggtctacgattgataatacttgagacggggtgtcggatgaatgttggggagacgcggaaataaaatttatggctccagcggtactccgtataggcagcagaaaaaggaacccgaatgaagttttccccccacagcggctggtttgtaccgactttccccggagggtggattgatctccgattttgtttctcttctattctttctgagccctatttttagaggcacctagctcaatacagtcaatggagacagacagcaccagaagatagccgggattacttcggtgtcagactccatgcccgacatttcgtgcccaattgggattataccctcgcgcaaccccaaatacattccgtatctcatattccccatttgtgctttcatagtgggtgaatccggctagacaaccaaggatgacatggaagaagccggtgatgacaccgtaaacagccccagctgcggcagcaacactgtaagggcagacatcgtagcctgcaggttcaagttaagtattagttaaatcattcaaccgatccaacaggagcagcgaagagagcgaccccgaagctttcatgatgtaggagagacggcaacgaacctccgttatgtgccatacgagcaaagacgtatcctcccaaggcattgaaccccataacacaaagttgtgtctgaggtttgccaccatatagccccccagccgctgaaggacaggaaaagattagcaacggagctgcaagcgaggagaaaagacttacattgatatatccccatacattctcccgagaggggaatagcagcgacaacagccgcaataagcaatgcgcttggtgctatatatcgttagtacaatgactagatgggtcatgataatgaccgccaacgtgagccgcacagagctctagctgaacagtgcttcagtggacgggtttccactcactttctccaagaaccaaattgctaatctccgccgtgaccaggacacaagttccaaagccacttgccaccagagccaacagtatccacgcgggcgttggcaagcccgcgtaccctgcgaattcgataaatgctaacacccctgatttagtgactccagcgagcgcaccgagttgtagtgctctcgctgtcagtgggctcccattgacatgcgcggcggtcgccactgcagctggaccggcggcagcgtttactgcaatgtctagcacagccaaggcgaagaacgtccatactagagtaagggacatggtaagtattgagtggaggcatgatgaagtcacatgtaggaagtcattctgatttcctctgggtccaaaacatgacacttactgttaatagcaggatgattgagctcgtccatatccatggtgagaattgtcagaaaaaaccagattcatatactgaaatagaagcagtaacgattcacacaagtcaagatatatgcctggagaacagaatgagagtggatgtcttataagaaaatccaacttcttagccaagacctgatagataggcaagctcccccattcctcgctgccaaaagcctcgcggggtcatgtgaatgatgttataagaggctgaaaagttttaggtcccgtctctcaccgaaacaggtatatcacgaagcattaaacgaagggctgcagtaatttgatgatacaattccagattgaccaatcaagaggctcatttgccgaaactaagtccctggcgttcccaatgagtcctagcggttcctgcagtaagccgtgcgggcaccccatggggcatccgaaggcgacccaatcccagtgcgactaagaacatcttggtgggctcagccgctgccttcccgtattcaatcccttgaagaatgatgatttgggctggtcatcgcaggagttcgtggcgcagggctactgcttagccacctacgtgtccgggcaaatgcttttttcctttttctcactctttcgtcatgcacagcgagagagactcgaagaacgtgaaagcgataatgtatgcttgaaccgagactaagatatagagcgtctcccccctccgctcagatcgtttcgcttgaataatcattgcaacgatctttgtgtgccacccaggatgagttcaacagcatgtatcatccaggctaaccccgatgtatctggggccggagtaagtcatttctcatgccgtcattctcctccatttagctcctaccgtgagcaaaagaacacccagctaaaccatcacctgcagatccgtatatcgatttacaccctctgcctaggcgggtcgatcgttagctatctactccgcgtatttgccccaggcgaagaccaagaagagttctcgcgaggcgtgtgctccgccctcggcttgcaaggcctagccctcctctgcacagcgatttaccagacagtgcggggcgacctaacactcttccacgcgatatgtgtcgtgcaccttctcgccatacttggcatggatttggtgagcaaaggccggtatgaaggtctcggtccatggcggctatatttcttctccgccatccagattttggttttggcggctttcctcgctttgaatgtctatgtttgggtgacggcgccgcaatttggcagccagcccctgtgcaacaaggacacggtttatgtggtctttggagttagcatcaaagctacgtctcccgtattccggtatatcattctcggaacattgggtgcggttgtagctggctatgctcttgttttcacttgtatcttaccgtgtctgtgtgggtacgctgcgtaccgaagacggcatcccgacgctggaaacaggattgagggccagaagagaggctggatgaattggtttatggaggttaatcatcctatttaccaggatcatcccgagccacccgagaggctgcatggccaggcgctgctcaactttacgctgaacaaggtcgcgtattgttcgttctgcatatacttgattgtgtcgctggagcagactatccatcggaataacctcgaccccgaagagaaaggatggacgtttggacaggttattgcgattttcttgttgttaggtgtcgccaatgagctgctcaatgttcttattgcgagttgggataggaggcaggctgaaggtgctcagcagctggtgcaatttaggccgggtactgggaactcggtgcattcctcatcttcttgatatgttcatgtccgttacaccgccgtgcaacaagacgctcataatattgctgatatctgaaagatcatgaagccacgttttggatcatacgagtgtttcttagcaattgccgtgagctccgatctcgcctgtaactttaaattgccatggtcagtatacaagaggtgaatatttgtgtcaccacatactcctaaggtggaagcctgctgctcaatgatgccaacggaaggttgttaaggctagaattcgaatgtgctgaggtcgaagtgaccccggccccgggcagttattcttaaaagggaaggcgcgctgtgatgcagagccaattcgttgtatgacatcgactaatttgtgcaggacacgatatatattctatttacaaacccgagggtgtcaatccaaagatgaaagatcccaaccaagaagcgtccacctggcggctcactaaatgttaaacatctaaccagtttgcgctcatttcatagtactgtcaactagctcgcggtatatcttcttgagatcggcaatatcagcgttaagttcgtcaacctgctcgctcttctcacccagcatctcaagagtggtctggtagcgctgatcaaggtcttcaagttcagcttcgagctcctccacgcgggaatacgagagctgcttctcttcgagctcacgcataaggtccacaacctgttgccgggcctcgtcgcgctgggtcgtcacgcgggccagctcgtccttggagccggcgcgctcgctctctaggcggcggaccgtggcactcatgcgctcgaccagctgcacagaagggcccgcgccgacagttgactcggaaattatgtcgttgataccgcgggatggaggtgcatgggtgccgccgtacgccgaaggagtgacaggagtgccagattcaaaatactcctccggctcaaaggtgatggagggcgctgccatgaatgacggattggtgttgatgtgtgggggagagagcgtggcttgggtgattgaagcagggtaggagttttggcgaggcggcgtaccaatttccggtgaggtgaaagccatagtagatgagcgccggctaggagggcggaagtccgatggccctggggtcatggcggcgtcgagagtgctcgaacgccgtaaagatgcaacaggtgatactccgcgtagttgcgacggggaattcacttgctctctccacttggcccgctcctcctcgagcttctgcgcccaagttgagtcgcatgttttcttctgctcggccatgtccttttgcgttgaggcgagggcctctgtcgctttctcgagtttgtgttgcagcttctgcagctcttccatgcgttcctcgagcttgctgctcaaatcgtgctcggcttctttggcgttatctagttcctcttcgaacttctttaatttctggttctacggtgatgtcggttagtcccgtgttacaccaatgcatggaactttgtcttaccatctctcgaatcttcttgcgaaggtcagcctcacgtcgcccagcatcatcgcgttctttctctacgctagccagacgtgatagcaaagatccttctagtgtatgccaatttccacttgcagcagcatattgtgtttgcaaggtctcgatctgacggagaagtttggcttgggtctctccagttgcccccgatgaagcttcctctgcgcgggagcgaagagtttccatcttactttccaagacagactgttcgcctttcaattcagcctcgagcattcgggccctctctttctcttgctccaccttctccttcaactcagtaatttccctcttggatttctcttcagtgatgtcgcgctcgatcttcaaattgcatagctcctcgtctagttctgtcgcccgctgcctctccagctctagagcgtcagaattcgcttttgtctcggcggtttcggcacgggaaacggcccgactcaattgcgatttcatctcttgcacagtctggctgagcgcattgcgttcattggtaacagcttctaagtccttagtcgacttggtctgagatgacaaagactcggttgccctcttctctgcggcctctgcccgcttggctcttgcttcggagttgactaagtctcgctcaagcttgtccgtctttctcttcatttcaatctgagatttggtgttttcagtaagttgctggcgcaatttcttgattaccgttcggtggtccatttccgacttagacagcttctgcccttcctctagaagcaatgcgatcttctcatctttctctaggagttgtttttgcgcactccccggggtagcatttgctgctgcatttttagccgattccgcagcatccttagcgaggtatttcaatttcgactgtaatgcatcaatacgttcaatataaccatgcatttctttctgccattgggactcggcagtcttatgttcagccttcagacgagcgatatccgggttttcattctcctctggtacctcgggcgattcaacgctaacccgcggactatcacccaaaccaatatcactcaataccgaattgcgttgcaaatccgaaatttcttgactggctttggccgagtcggttgaggattgagccacctctacagagatcctgggcgcggagtctgcgacgctgatgtctgttgaaacacgcggtgatattccggagtcgtagcttatcctcggtgaggctaatttatctgcaatgctgtcgtcatttggtcgcgagatctcggagtcttccaccgcactattcaccgatgcaacgctggaatcaatgtccatacttgaccgaggttcattgctaggtactgggctagcaggcggtgatgagactcggctttgaggagaatgggaagagagattcgaggcattctgtttcaccatagctcgggctagacgttcctgaagccggtcatttcttcgcgcggtcgatgaactgcgggataccgctgaaagatgttagccagctcgactgaatcgcacatttactgaggatttcatacaagaagcaggagcctttgtcagtggtgcatctccgccctgaatttcagtgggctttgcagtagagttggtctggtttccctcctcatccatcaagatgagatccagccgagactcgacgccggctactgcctgctggaaaaaagaacccactccccattttggcttttgtgcctgcgagttctgtgccattgtggcagaattactgtactggatatcgcgaacaggctgctaagcggcaaatgcctcgtgtcgcattcgcatggattcggtgggggctgcgctcggacgtcgacttgcgattatcgtggggaacgttgcaaaatttcagaatcaaggcgacaatgattttgctagaagtattgaagcctaggcggcaatggcaaggacttgccgcgagggcgaatgagggagactggcaggattaagccggattcgaagtactaggcgggaatgcaaacaaagattaagacgctggtccgataagacagtaagaacaaggcaaattatcggcagaagagtctatagaaacaagaaagacgatagagaaataagacgcgagaaaaaaaatagagaacagaagacaagttgaggctatgcattgagataccgtaggtcttggcgcgggcttccgtcatccccaagctcccccgtctctctggacacacctcgagtttgtaccattcacagccagcgacgctcatttttctggctcaaaaaccccccagattacacccacaatgtcactggagccacccacctacctcagctccctccagaataacatccgagctcggccaattccgtgggagggtgccgtccgggcgggcaacatcaccgatgaccacttgaagaagatcaaggcggtggataaggtgcgcaaggagcaacgccgtcagacgatagaaggagatcttgctggatacacagatctgttggccggcggtgcacacggaaagagtgtcttggactcggcctcgagaaggaccgatattgtgcagtatatactggtgctggcctcggacttgattcaaggtataacctactagcggagctgaagttctgaggaatcatactgactcatattaaaaaagatgtgcctgctttggccaactcgcttgtttctcaccccgaaccgtacaagcccttcctaccattcttgcagcactcggcaaacgccgaagaccccattcctctgctcacgtccaccttcctcacggcgctcgtgtcgcacagtctcgttgcctcatctaaacctgcaccccgcgacaatgaggctcttccacagctctacacctatctctctaccttgaccaagaatcaggatagtggactccaggatattggtgtccaaggattctctgagctgctaagaacaagccgagcccgagaaatcttttgggcgcaacgtcaagagaccttgacccccttgatcgacactcttcgagctgcggcgggtgctaaagacaacgtcagtaacgcaagcacactgggaagcagcactcgcagcgtcgagcctggtctcgccggtggtattggccttcagcttctatatcgggtgctccttgttctatggcagcttgcgtttgaaggcgctctcgttggtgatgaacttcaagagtgagtgatgtgaagacaagagatcgaatatacactctgagctactaaccccacacaggaactatgaaattatccaactgtacatccaccttctgcgtctctcaccgaaagaaaagaccactcggttgcttgttgcaactctgtacagtctttgctccagcaaccggacaactctgctacccatcgccgtgttccttcgactgcccgccctcctgactaacttgtctggtcgtcatctgaccgatcccgacctgctcgaagatctcaacgcactctcttccatgctggaggagtacaccaagacacagaccacctttgacgaatatgccgccgaagttcagactggccacctccgctggtcgccccctcacaagaacccgaccttctggaaagataacgctcgacgaattgttgaggagtcgaacggcgctttgcccaagaaactggccgagatcctatctaagagttgggataacgacaagcaggtactggctattgcttgcagcgacgtaggtaacttagtgaaggaggttcccgaacgccgtgggcagttggagcgactaggcctaaagacgcgggtgatggaactgatggttgatcaagatgaatcagtacggtgggagagcttgcacgctgtcggcgaatggcttcgatatacctttgagggctgatccatcaaagaggactttcccgatatgttgatgggcttaccaggatggacatatactctggttggcatgtactgtgtattttcttgccatggcgcatactcgcttctttttttccgggggagaatattagaatcatacttatctatgaaattcatggcccctatattctgatacatattccagtactctaaacggtggatattgcggtcggccgctaaagaaccccagacctgcaaacacgctgcgacaagacaagagcaggaccctcgatctctctctataggatctaatatcatgacttcaacccctatcgctgttccctagagattatagattacattcgccacgcgggcggcttatcggagagctttccattcccccgcaggaattcttcgccgagaacatcatccaaccgttcaaaatccacagcacccatgtcgagatccttcacaggttgcaagagatgtaaggcacgccgacaaaaatgtgacgagctgagaccgaactgcgggcgctgccagactgcaggcgagcaatgccaatatgcaatgcagttgcagtggggtggacgggcattctcgcgatcccggtttggtgcttgcgtcgggacaggaggcatgcagagactcggtatgtctttataacagagggaccttgtacatagttctgactatcccagaatattcaccaggagagttcatctacaccaccaagacggcggtgcagtcagccagcgccaaaaccggatcagatctcaccctatcgcaacccgtcgatcccttctcgtccttgtcgtccagtcaaaaggccttgttgcatcattttatcaacgatgcctcccaaatcaccgcatgccattcgggaatgcagcaggacataactcgcatgctgatcccaatggctcttcagacaccttctttactctacgctaccaccgccttatcggcgatccatattcaagccctacacaaccagtcggagaccgtaaagtcagcaccggatattgcccgcttaatggctctcagtcttgaacatttccgaacagaactgcagaatccctcatccaaggatcccgaggcgttggtggccacggctcggacgctctgtctagctgagatccattctggggcgatcaacccgaactcatggagagcacatgttgacggggcgagggcattgatgagggcatctgacgccgctggcgaagattccctgcggtctacaagcggtttccggcgatatttggatcgttggtactggtcgatcgtgtcgcttacggcactgacgggcaatggtccacccattggcgatatctctgactttgtctcatctgacttgatggggttgggtgggtccactgattatttagatgactattggggtttcagtgtagaccttgcggctgtctttaggcaaatcggcgctgccgcttggcgaagccatcaagtcgagaaggctacccagggctttgttgcaggagaggttgatgacagtgttgagaatgatgccgcgtccttggagttcgcaattcgacaactcatgaatcgtgactctagctcgcagccctctttttaccctagagccgctgaaggcttatctgcagagaccgcgcagcagctcctgctatgcaatgaggcattccaacatagtgcgcttattcagatccatcgaagacttcggaaaacaccaactacatcgccagaagtgcagcagtcggtccgacgtatcctagagtgcaccgcgcagattgggccatcatcaggtctctcgccttgggtgatgctaacgacaccaatctttattgcgggctgcgaggcgcgcggtcaagatcgagatacagtcaggcaattactgtcgtcgttgcatgacactatccgcgtcccgaacgttctccagtcactaagattcctcgagcagtattggtctaaccaactcagcgaggaagaagactggagccatttcctcggtaaggttttctcttagccgtttctttgttcatgctaacatccgatagaacgaatgcagttcgatttcatcccttactaaggagatcaggccagagcctgttatgcctcacgtgcaatgattcatgtttttgagcttgggtactatcttctttcgttacactataacttttcgtgtgagcaaatcggtgttggcaggggttttggcgagcgcatgtacctattaagccatggagtttggaagtggcaatattgtttttaagcaattgtacatgaaatgtctttgttctttcgaagctaacactttttattgggctcgcctatatttaaatatctgagtattagttcgaccaaggaattgaccacatggatattgaagtaaaaggcgccaagcctaggagatatatagacggaactaagcagctaatctccgcattcggacataacaaccaaatgacgcgatgagtcaaaaatgataacattggaagctggtttgcatcatcgaatctcaaagcttcatgatcccgagtctagataggtcagatatagcatattctaaccttatacgggtcggagtcgggtcaactcatatacgaaaccccgggatggcgtctacgagccattatgattcgcgtagactcgaacctacactccatggatcgtataaccttagcattataagattacctatcaatagatgcgttcgaattctttgaaatcaagtattctgattcctaatacacaaactttagtcattcaaattcaaattcgaaaacgtagtggtgcttgggaagtatatagtctgttataactacctctcaataggagcttgatttgacagtatctcatctcgttcggtcccacgaacctaagggtgtctttctcgtccttatccaatggaatctgtcattcgagaggccccattcgggcagcttgttcgtctcttgacgaacaataaatactttcaataccccgaagaaaagcccgacttcaagcttcccgacacatggcttcagttgttgaactctagggatgaaggtaaacaaaagaacgccatccggcatgactccaaccgaagccatgaacacagtgagcccctaagccggtcctctacccaggcatccatgcaattcaccgaagctcgcctcgaggccgacgaagaacatgaaatcgagaaagtcgaatccatccccatcgcccccaagagaacaaaagacggttctatcctcgttgattggtattataccgatgattcggagaatccacacaactggtccaacctcaagcgcgctctcatcactatagtgatctgtctatatacctttgtcgtgtataccacttctgcgatttacacgtcctcaacagaaggtgtcatgaatgagtttggtgtgagcacattggttgctactttgggtctgtcactctatgttctagggtatggtaccgggccattgatcttctctccactgagtgaaatccccgtgattggacgtaatccagtctacatcgtcacgatgttccttttcgtgataatctccatcccaacagcttttgtgggcaacttcgccggcctgatggtgctgcgatttctgcaaggtttctttggctcgccctgtctcgcatctggaggtgcttctatcggagatatgtatagcctaatgtccctgccttatgccatgatggcttgggtttctgcggcatactgtggacgtaagtttccttcccgtttatatatcgttatatacaccaaataacgttacctatactaacactatacagccgctctcggccctcttctcagcggctttgccgtcccagccaaaggctggcgttggtccctcttcgaatcaatctgggcctccgccccggttttcatcctgatgtttatttccctcccggagaccagcagcgcaacaatactactccgacgcgctggccgtctacgcaaaatccacaataatagccgcttcatgtcgcagtccgaactcaaccagcgcaatatgcatatctcagacattgccatcgacgctctgatcaagcccctggaaataaccatcaaagatcccgccgtcctcttcgtccagatctacacagccatcatctatggcatctactactctttcttcgaggtcttccccctcgtgtatccagccgactacaacatgaacctcggccagatcggtctagtcttcctatgtatcatggtctcatgcattatcggtattgccgcctacgcgagctacatccacttctggatgcaccgtcgcatccgccgctccggcttccccgtaaatgaggctcttcttatccccgcgctgcctgcctcttttggtcctctgattggccttttcttattcgcctggacggctcgtgcgtctattcactggattgtccccaccatcggtatcactatctatggtgccacggttttcgtcgtcatgcaatgcatcttcatgtatattcctctcacctaccccaggtacgcggctagtctattcgctgcgaatgatttcttccgcagtgcacttgcatgtggcagtgtgctgtttgcgcatccgctctttgggaatctgggcgttgctcgaggtgtcagtcttcttggtggactgagtgttatcggtattatcggtatttggttgctttacttctatggtagtaggcttcgtgctttgagcaaatttgcgatctcggatgaggttgaatgattaccttgtggtttaatcacgatttttgacgaaaagttattgcaggatatttgttgatagcgatatacggaaattgttggagaggatgagacaaagagcgacgttacattaacgatgaacgtgaatctcgattctcgtcatgaataatgagaatcttaatatttaatactgtgaggagctctttgtctcttgaataaatattgttaagcctcatagaaagatgagagaagttgatccggatcataatatcctcaagctcaccaattacgagataccctcatcgttatttctgtgcacgcctgtttgcaatgaatggcgctagctattctacctgaaaagtcagtgattaccaaagtttaatagtattgctttttctatgaataggttggcactagtaggaccaattgttggcacagaaatatattattaaaaacgcgtgactttgaatagattattccagaaagatcatttgaaaccataattggtgttaccaatcttcaacttgggtttacccacagagagaagtgatatcctcagggacgtaggtgctcatgatagaaataagcttcgagagagggacccagtcaagaagaccgtggatgcttcgtacgggatggccactatacaggacccgggcgtagaaagactttgaacccttcctatctttcgtctccctgtaaaactgttagagaattcccgtattagaaaacagtctgacttaccaaatttcgaaagcaatgttggatgccatagcaggccagcgaagcgcctcgattcccaaagaaccgaggataggaccaatatctccatcatgaataaaggtgtggctgtaatcaagggaagactttccgctcaggacagcctgcagacgagaaacgatctcgccaataaacaagccctcgacaagctggatgtacttgactacatccgggttcgtgcgccagtagtagttccactcccaatcaccggcacggaagacctcctgagccatctgcttcgtgacacaggttgagggatctgacagactgcagggcaactcatagccattgcaaagacggccctggaagttatccgaaaagtggtcaaaggtattctgccacgaactatctgtcgcgcccaacatagagccgagcttcgagcgcaactccgcggtaacattcatatgctccttccactgtgtggtagactgcagactagacagagtagagctgatagcagagcaggagtatccctcgttgacagtatcaacggatgaaaccatttggtgcaggggcagggctccctcgtagtgaggccacatgccacgcaggaccgcgccagccgaagcttgggtgagaacggactcgctggagcggaaccagactcggttgtttggcttggcagggatcaaaccaagcttcttgccgtagacagaccacaggtccttgccgtgctgatatccgtcctggactcctccgatggtgatctgagggtactgacaggtgccgttcacgccggctgagaaggggttggtggggtcctggtatgtctgcgcatacattggcatgggctggatgccgcttgcgctgttagggcctgcgtagagatacgggcgcacattgtcgcagtgatactcttggttctgggaaggggttagcttaggcttagagtcgatctgagagttgcttacctccccacctgggagaatgttgtacggagttcgtcgctggtgacgctgcagatactccaggtacaccagctttcccttagttgaccccttggttagagcttcgggcagttcatattccgctgaacgagggtgcggcatcgaacagtagtcatagatgccgtaggggctgcccccggtcggtccattggttggagcttcatagataccaccatatgtcccaattgagctgtcgctgatgtatgacgtatcattcagcgttgggggatagaaggtgtccaccggggtgtgacccagcacagaggctgccacagaaagcaagacgaagctgcgcatgatggagatgggcttgagtgaggagaaccaagactggcgaaggccttcaaatatatagatttccgaagccatcaccaccaggcccaaactgataaacaagatgaagccccaccgcattggaaccagtggagattggaaaatcggcgcacgtgggatcggcaggccaacctgagaggtgctagcaaccacgtggctcggcatatagtatataaccaactttcggctaaacgattgttctcaacgtcgtgtcgtccgatcgagatgcaatttcccgatgtttccgatttcgggtctcggcattacccctgcataatcctgccgatatcagatgcttagcaaaaactatataacactatatattccagtccctttgatcaggatatttgattatcggtcgactcatctctcacttttacaatgatgtggaaggcttcccttgttatggccatggccatcccgctggcgtccgccgccctggcggattacgcactgcatacagtccttgacaatgctgctccgatctttggatcgtacaaaaaggtcacagggggaaagtcggaatggatgaagaaatatcacgacaacactttgctcgttcatatgaacatccccggcacccacgacagcgccacgggaagttacaaccaggcgacgcaagatgcccttcggggcattacagatctcaaccaggtcgttgttccggtgccagaggcattgacgtgccaggatgtgaatttcatcaacatgctcgacatgggaatccgggcatttgatctgcgatatgctttcgatccaacaaacaccactctcatcttctatcatgcacaggccctgctgtcggagaaagctagtgtcaatgatgtgctctttggcttttacaagtggctggatgatcacccctcggagaccattttcctgtcattccagtaccagggctcgacagctctgtacgccgaaaacaacgcggctgtgcagttggagctcttcaataccctcaccagccccgcagcgcgccattatttcaagcaaacgaaggatgaattgggtaccttgggcgacgcacgtggcaaaattactctcatgcgccgtttcgacctggaccagcttccggataactacacagccgcacttcccggcctgcacttctcgcccaatctctggaatgataacggcgccgccatcgacctggtgtacaactcggacaagaacttgaccgcctacatcgaggactactaccagccgctcacgcccactgggtccagtgcggttgagaacatcaggtggaagtacaacgccacgacggaaaacatccacaaagccactacccagcacccgaacagtctcttctggacatgggcgtctagtaacaatatcgtcaacaaccctcccgattggcctcggatcatggcacttggaaacggcacccactatacaccagctggtggagttaaccagcagctagtgcctttcctgaagaagcagaaaggcaagcgtgtgggaatcgtgatgtttgatttctttgagcagccctccaacctggttgatacgcttttggatttgtgaaatacaagatgagcgagatgttgttaggagaatagtcaatgaccaagcttaaccttgggatcaatagattgaacaatgtggagccgaatagattacttaaactttcctcgtctatctgtgctataaactccacaattaaaactggatattccaagacccatcgctcgcatcacgcacgtggacacgcccccatcaggtttccctacccgcacgacccttcccaaggaacaatcaaattgcaatgccaatcaaatccgatacaatgcccttgtcctccgctgacgtcaagctctcaactaggcttgcccagcttggtatattgatactgcgcccagtgaggaaccccatcttccaagtttcccacttagtcgtatccaaagagcacatgaggctagcacaacgggcgaattcatgtttctccagaatgtcctcctggtcaaggcagatgcatctccacgcatcatccaccttatacacataatcccagatatcataacattggctgtatttgattttttgcaactcaagccagccagatcgcaccaaactccaatcagaaggtttgcagtgcttctccagcttctcccacatctgctgtgggtttcgaatgttgcgaacaatcagcctggtcgtggcagataggtttgtattaatgatttcccgcgccgcctcatgcaggctgtctaattggggttccaagtgatgtgcttgagaaagttggccgattttgccctcaaccaaatccaaaagaaaattgcggctcagcatatgcctcattttgcggctccaggcgcggtagtcggagcggccgcgcaaagggggacaatcgcattctattgggaaattatcatcaccgaatgcatttcttaagctgaaggtacgttcgatcaaggtctctgcttcggtaatctgtcggtcgctggggctttcgggtgcgacagtcatctcagtggaaatctgctcggcggaattgacccggcgtctttttgcgggcgaggttgaaggttcatctcccggaggtccttgtccagagagggatcgtttcgtcaatggtgttgaggaggccatgctgtttattcttgacgcgcagacctagcttggtggataggaattctcaacacagcaggtcaggacagggcaatgataatcgataaggaatgctgtgaattttcataggataagtattgaaatattgaggtatgacataggtaactatcaccacgtcgagcaaggagaccaccgtttatatgtacctagcccgacgccagaaatattcacttccagaaaactgtttgctcaaatatgcagccctacattctttggaaaatccagaaacttgacattttagacataattcccccttttcaacttctctggatagcacctaccgcatgtgctatcgagtctctcgtggcaaggtaacagctcgagtaactccgttgtattatagggcacaaagaggatcgatttcgtagatgtaccaaaagctccaaagaccgtgcttgttctttcttccctgtactcacatacattccgcacaacttctcagaactctaaacctctctcactgaatacctacctcggcttgaaaggccagaatgccagcaactgcaacgtctacaaatgcaaaaggaggagcaaaaatagtactcgccgcgctaccagccccgcttgatgctgaggtagctgtagatgtactctaagctgatataccgcttgaactagtggaagtaatgccggtggaccctataggagataggagagttacaggtaaaattcgatgtcatgaggcagaggtcacggttggtgtagttggtggtagaatttgacccatcatgttgctcgtcatcgtgatgttattgaggaagcgcatgagtgcgttcctgtcatggcaagagcgatggaacaagagagatgaagagtgtaaaaatggaaagagcgttcgatgaaaagcaggcgaaaatttttgaagctagcatatgatctacatcatgatggccataatcgctcatgtgtcatttggtagaaaaagtatatctcattgagtttcagaaacaagggctatgtaatgcttgacccagggcatgatcttatctgacttggcacatcagtgaggtgggccgatcacaataaagcggagagaaaaggcaccaaaatcgggcaatattgtggggtggatgacaaatgctgccggagtagcctcggctcgtcatgacgtcatcgagagagggccgtagctccaacgaagataaaataccgccagtctgcttgttggaagtccacgccgcaatcaaagtcgtctgattgattgggtcaccttataataaatattaacgtataatagaccagcaaaagaaaatgcccccccctcgcaaagctctcattgcaatcacctccgctcatgctcctctgtacccggagggcaaagagactggtaagcctctacttcgaaagacagctcaagatcagaaataacggcaacttgacttaggcttgtttatcactgaagctttgcaccctttccttgtcttcaagaaggcaggattcgatgtcgatctagtgtcggagaccggatcttaccaacccgactggctctcgcagcagaaggactggcttaacgatgaagacaaagctatctgggaggatcactccagtgaattccgctctaagcttgatgatctcttgaaaccgagtgatatcaattccagcaacgtaagtctcctttacggatacttggaacccgagctgagcattactaaatcagtatggcctatttttcgcttcggctggtcatgcctctttgatcgactacccagaagccaaggggctacagagcattgtatctaagatgaacaccgacggtgctatcatctctgctgtgtatgggtaactgcacctccgagctaaacatatttctaattctgattaggtgccatggcggtgcaattttcccaggaatcattgatcccagtacaggaaagtcgattatcgctaaccgaagagtgactggcttcactactcagggagaggaggaagaaggtgttctagacaccatcaaaagctggaaccggcccaccattgaggcctccgctgcaagctcgggagccacatgtgagttcgatgtccaaacgtcgattttttgtatgtctgacacgacattagatgtctctcctcctggcccttgggacgctttcactatcaccgatgggcgcctcgtgactggtgccaatcccgcaagtgcgcatgtgacggctgaagctgcggtgaatgcgtttgatgctatctaaagcctagatcacttgggaaacgcaggatgccctctgttacccaggtagtaatagcaaatatagtatcatccattctcattacagatcccagctatatcgtaggtgtatattaacttcacggtagctttgagcgttcaaaagcctcatcggttttggaagtggacaccaactcgcgcgaagaacctggatatgtgtgaaccacaaaagtgagatagttatgtagttcacccccaacaaatcgcttagtggttcacatgtcttcgcgagttggtgtccttttcgttcttggtcttcgaaaagatatggtgattatgaacagcaatctggtcagccgtgatgaattaaaactagatgcaaatgtatcactgaagatgtatggaggaggatgatagaggaaagggaaaggtgggtcttgttgtggggctgctttaggggtagtactaagccttcttaaggttgtataaactacgtaaaaagaagatatccataaaaggtacatttaagaagaccattgaaatgactactgaagccatgttatgccttcagttattcctatatatatcgaaaaaatgatttctacattcgaccaatatgattttaaatgatatgatacgaaagggctcaagctagatcaagacagacatagcatgaacgaagtgcaaccaccgggacctactctctgtcctggtatttttggcagcaatgagaaaaatattgattggcaaatctggaagacaactaaggcttgatctgctcactaaaatttggaataaatgctctgacatcatacaagtttggaagtttggaagcttgatagtgaaatgcgggaagctggacacactgaggtatagcatttccgttgtagttttgagttttgcgagctacctaatcctctccataaaatatcaaggaagttcaattccttctttctctgctgtctgtaagatgtattgcttgacctggataaacacaacataaattagccattctaatccaagtggatacttatttatggcgaggtgcttaccttatcatctgggactagctgaatcgccagtcgaccttcattgtctctttttgccgcctctgctcctgacttcaacaaaaagatcgcagcgggcccatgtccttcagagatagcgtgatgaagtgccgttaatccgtcaccatccgttgcattgacaggactcttaccctcttccaagaggagcttcaagataggcacagaccctactgcggctgctctgtggaggggcagttggccacgtttatccttgactctggcgctgcatttattggcaagcaaggtgcggacggtggaaagattggccttggaactggcgaaatgcagcgcattctactagatggtaagttcatgtacatccagtagccaaattcgggtctcagaaagctgacctgtccagtgtgacttttgatagaaacatcggctccttttcgcagtaataggtcgatcgttgcgtcgcctgcggcatctttcaggctagctgcaatcatcagaggcgtccagccggatccatcctatgctgatttagcaagtttatatgacgatggctagtcaattttgaaaaggcttgggcattcttttcgaagacagaatagcgatactcacttctacgtctgggtcgaagtccttcatagcgactagcaattccacgaccgggtgtcggttgtaggccacagcccagtggattggaagacgctcatcgtcatctttcacgtatgcggattttgggtttgcctgtttcgatgattagccttgttctgggagatcgaacagtaccagctcgagcttgatgttgcggggcagcctcggccctaggtggagcacaactcacattgagcaacgactcgacaacctcatctaaagaaatcagattagtgcttatttaatacaaagaagggtcaaactctcacttcttccttctcgggcagcctcgtgcagagggaatttctgatcggaatccatgacgactttggaggaagaagagtaatattacgataagagctccgataagccgggcggctgagtcagtaatattgagcctcgtgatctcccgaagagggtaaaatttggccaaaatgaatgtaggtatcaatttactgctctaaaaagattgagtagagaatatattcagttggagggcgcatttgactcatgtagccgtcgttatatatttggtaaatcaggctagaacgggaactagcagttacaagattcgctacaaagtaggtaaaccccacaacccacaacccaacaggctattattattgttataacttgttataaatggtcttatgaaagctcattaatgaagatattcatatgtctttcaataattaagaactgattatctgaataagaacacccggttcaccgccctctaacctcaccgcccgttttagccggatataattgttggccaattatggcgcctcaggcacgaacatccgttgcaacttcgatccaaagattcatgcacgtccttgtaccatcttcaaccatatcttgtctcgcagctactagagacgcagcgtcggtattctaattcaatcaactgcacttttagaacaagtgccgagactgaccctccggactcgattgcagtcacgaactagccacaggcttttttcatcgcgcgcaccatcgaagtgtgattctttggagctctcatccttcaaagcagaccgatttatctcacccccccccacatcagttctttgcacacacaaaatggactacagcgcaccccattccgccgatgatgccgtgcgcatgtccgcgaagcggaccgccgaactcttcggtgccgaatacctgatggtcacaccttcaaccctcacagacggctcaattggcgtttcctaccgacggaaggcggagtatgaagatattaccgagctaccacgatctctcgccgagaaacaggcgaaagcttcagccggtcggacaaaacggccgaggattcaggcgcagacacccgcagacggtagtggctcatccatgtcacttgtgaggcggccatcgggcacgggagtaggagctgaggaccagcctaagagtttggttcagagaccgtcagccaccaagcaacagcggcccgagtggcacgcgccttggaagctgatgcgcgttatttccggacatttgggatgggtgcgggctttggcagtggaaccaaacaatcagtggtttgctagtggagcaggagatcgcacaatcaagatttggagtttggcgacgggcgcattgcgactcactctcactggccacatctccaccgttcgtggcttagcagtgtcaccccggcacccgtaccttttttcatgcggtgaggataagatggtcaagtgttgggatctggagacaaacaaggtcattcgacactaccacggtcacctcagcggtgtatacacacttgcccttcaccctcgtctggatctgttagtcacaggaggtcgtgatggcgtgtgccgagtctgggatatgcggacgcgcagcaacgtacacgttctcagtggacacaaaggcactgtcgccgatatcaagtgccaagacgccgaccctcagattatctccggctcgctggactccacagtccggttatgggatttggccgctggcaagagcatgggcgttctgacacaccacaaaaagggtgttcgcaacatcgccatccacccctccgaatttacatttgccagtgccagtaccggcagtatcaagcagtggatgtgccccaggggcgatttcatgcaaaacttcgaaggtcagaactctgtcatcaactctctgtctgtcaacgacgagaatgttctcttctctggtggtgacgatggttccatgtccttctgggattggaagactggtcaccgcttccagtctacggaaaccactgcacagcccggctctcttgaagccgaagccggtatcatggcttctaccttcgatcgtactggcttgcgtcttatcacgggcgaagcggataagaccatcaaggtctggaagcaggacgaagacgctacgccggagactcaccctctgacctgggcccccactctcggtcgacagcggtactagagggatgaccagcatcactggcattcgtaccctccgttccgatttctcaataccctgtatttattttccttttttgccatcaagtttttatcggcaccatgcggagttaagcgcggtctggaagatctttgatcttaaaatattcaaacatgtaaccatcgggacaaatttcctcggaacggtttgtttcatgctctgaaagaaagagtcatagagttttgtatgatacaaaccccaattgagccaaacgatacccttgacaatcgaccctgctagacaacacgtacaagtagcctctacggtctagagtacagaagacacagctggactgaacgggtatcatatgcaaactatattacactaactctggataatgcgtatcgtatcaaaaatccccaaagacaagcctgaccatcaccgctcaatacccaaaccaaagcccttagcctccgcatcctccctgaaagcggacctgacatcttccgctgcaactctgagccgaactttactactccggtcgccgcgagtggggatcgtagtacccccgagcacgcttttagagccagagccttgctccagtgccaggacacccgagttcatgagcaacatagctgcatagcccaggctccgcacgcgagcagtggggcctccgcccagtaggaaatctttcacgccggcgcctgcggctccagcaatggcgacggctgcatcggcgatgcggcgggcttcgtcaaggacgtcgccaaatgtagattccgaaatgccagttcggtggacgcgggctagtagggcagcgaggaagagcttccctgacagcgggaggcagcgcaatgattgttggagtggagttgatgtagcttcgtgaatagcttgcttgatagtggcgatagtgacgcgccccggctgaccctttgcaggaggtttagcgatggttgattctccggctgctttgactgcgacagccttgttacgccggccgggggttttgctgggcgtaggaggcaatgattctgtctcgtctttggcctcatccgcggcagccgcctcatcggctgcttgctcggcgatttcaacggcccgacggcagatgtctaaggctcgtcgagcatcgccactgacagcggctactttgcgacttgcgaattgaacggcgtctgggtcaacgatattgcccggtacactggccaggcgggtactgatgatttccattagatctgtgtgacggtatcccgggaatgtgatacgggttaaaccgagacgactggatattttgttgcttagggttctttcagggagatccatggtgtttgcaacagccaggacaatgaggcgcgaatggcggagagcaggccagttgaagaagttatacatgacagactgattctttgtgacaagctgatccaattcgtccatgagcacaacgcaggagactcgacgaggggagggatttgagaattctctttcgagaagatccaatgcgtgggaaggtgatactcggtcgcccttcaaggcttcccatagtaaggagtaggattgatgcgggtccgtgactttcatgccgttaatctcgacaaagatgaaatcgtccatctcttctgcatgcacggcaccgtttagctgcgcaaccacctcacgcactgtggcagtcttgccagtgcccggagtaccagagatatagatacaagcgcctgtgccttccatgatcgcagcgctaagatggttgtatacagtgttgaactcggtcttccggcacggtaatgagtctggaacagtggagacgtgtagtaaattccgagcctgacggtaaggagagtcaaaatgcgtgggtgagaggacacgggtacccagaggagtaaactcaagtggtttttttacgacaatcctgatacatgttagtcttattttatgacacacattcaatctcgctgtttcctaccgtttatgggttggggtcatcagggccttctttcgctgtgattgtggcgtggcattcgttgctgctagtcgttgtttctttctcggggtcgcaggcaccgtgatctctttggtatcgacatactgtaatggtccaaatcagcgctggtttgcagttggaaccgtgtggtttaactcacttcatcgtccgcagccttgcgtttcctggaagccttcaagccatccctgacccagctgatcagatcttggatgttgttttcgttgtacatctcctcccagacaaactcctcggtgtaccgtccttgaacctggttcacgcctcgtcgacagacaatgcacttgttatattccgccaattcagtcttgttctttggaggtccattcgggtatttggcattgaagatactctgagacatgactgcccccttcccgctgattgatgtcaaggggttgctgttgaaatcgagtgtgatgtactgttcgttgggcaaggcatcggtcctgcgcttgttcctcgtgcccataaattcgtcgggggatgcgaaccacataatattggcggatttgacaacctcgtcttcttgatcttcatcctcctcctccaaaaattccgtaataatgccaacccagtcctttccagcttcaggggatttcaaaagaatcacatcaccgactttgcattggaattgacccatgtgtgcgccaatgattttgcgtttttggcgcgctggacgggatcgtcttcggctgcgtttcgccggggtatcatggttggcctcggtctcttgggtagtttcctcagttgtgtcgtaaatccactcccatggaaggtcctcgacgcctagttcatcatcagagtcgtctcgaaccagagctcccttggtcatccattgggcgcgttcacgggcactgcgcctttgaggcgaagagtctgaatcgctatcgctcatttggggtgtgggagatatgacgggcagaatgcaacaacagagaaggagaaatcgcgcttgacgcgttgtccactttcgtcccttttaggtttagtctgacaaggaggtctagccaatcaaatccatatattgctaccttatagtaaaacatggagtagagtaaagtgcaggtatagactatacatagtatgtgaatatacaatatttcttcaactaatcgcatacacgtggattgaaatcatctttaacttgcttcaaagacatcactcagtatattgtcaaactactttttgaagtttatctactaacgccttggacatttctggaacattttgtagagccaggcttaatctccagttatgtctggcataccagaagttccctggttgatttgaaatgtcaaattaatacatcattgaaaaagtgaggttgatcacacttgccagatgcttcaagattgcggaacggatatacgagatcggagatgtcggagaaacataactccggaaccctaacaaaatccaacgacatctcagaggatcagatctatatacttcctaatgaatttgcttttacttgacttcttactactataagtgacttttataacacgaataccaacatgcaatgcacagtatgtctcttttacccttcacagccaaacaggtcggcgggaacattgatttccgagtgtcttgatctatcaatatcttcttattgtacagaaagtcaaatagtggacaagctgagatgttctctaaggtaattcatatgacctggatagtcctggggtctctagctactacgccgacgcatatgtaatcaataaccgcggccctgtggctccacctaggcaggaatccatccatggatgaatgaatgctcttactctttgataactcccacccgggcagcctctctctttccccttctggtcgcattggttaattcatatttcattcccttcctttatctttcttttacctcccacacgagtagcattccttaagttgcattccgtcgccccccagcagtcgccctggcagtcgatctttgttcagttccgttgcactttcatcgcacttccatcgaaaagtagcgaactactaatcccccctttctttcacttctgccgtttgacatttccaagataaccgcgtcaccttcttccaacttagctcattccaacaatccgtcctgtgagagatcgctacggtcatcgcacagctgtcgctatcagaccccgttgaaatggcttctctacccgagccccatgataaggagtaagtttatcttacacatggataattgcaaggatattcgctaactaattccaccagctgggagcgtaccaatgccaaatgtgagagataatttggttctcaatcatggttacacgtactgacttagatagcatgggaactaccctattatggccctggtccagatttcggccgggggaccatctacgatggggatgccgaccagaacacggataataaaagtaccgatgaggatgatgaggatgctttcgaggacattaactacgaccgccctcccgttgactatcagctgcaccctacaagttcaaaggttgctgtaactggtcgggctatctcaagtgtacctcctgtacctacgccatcgccggtcccaagtcaaagcacctttcaaacccgaccagttcctactgggtccagaacaggtcgacctcagtcaccaatggggccagtgttcaatgagcgtgggcctaataccggaatttccaatacattagcacggccgcattattcggcatgtaatctcaaaccaggtcaacgtacccctgtcaacaggggacagactgacacaccgcgaccaccgttttattccaaaaaaggcagcactacttctactccttcgcaacacaaagctaggtgtccagctatttcatcggggcaaaatgactctcattccaaggcaaagtggcgcaaggggttctctccagatggtaagtatgctcacatcaacctcaagtccaccattaacgatcaaatagcgtcttatcgtttgccatatgagtgccaagtgtttcaagagaagtgagtacatacagctttgcagtagctggtcttaaaactaacccagacattgaaggattagacaagtcactttaggagaaatttccaacgtcgacttccgtcagcggattatcgaggagacagatgcatatatgaggatgagcgcgggaaacgccaaggtccgtttttgctaaaaccctccaatatctagagactcattatactaataatcatgaagcttgttcacatctggggacggcaaaagcaggtgttggaggcccagaatttgcttcaggatatggtgaatcggttgatgcagcagcggacttcgcctacagtagcgcgctggaccaaggttcacgcgcattcaaataggaaggttgcccatgcccggtcacaagaaagccatgaggaaagattgtccgacatgcggaagcccccgagaatcaccacggattacacggtatgtataacgctcagcccgccctactttgcttccgtactctatggatactgaccgacacttgatactacagctcgctttcctctggccctcggatggcccctcactcaaccacttgatcactgcccggcgcgagctcctcgattccattcgattgagatatgacgtgaatatctacatcaagcctggtatcccagactaccttttcatgtctggaaataatgagcgggatatgtccatcattgcatcccgattccgagagctatgggagagggtaatggtccagcatgagacggaaatcaagctgttccttgttgcggcgccccgggcagagcttatgagaactcacgtcatcctgcaaaagtccggtcggctctcggtgcctgttatctgtggaccggagctggccccagatgtaaccgcaacctggaagaccactgcggatgaaatcaagctcaataacaagaacattgtcaccacccgccttaggaaagcactgcatgtgattcctcaatttcggggattcctgcaaatgcgagcaaagttcggttcgttcgccctgcaacagtggcgcaagccgaatgatggcacttcttatgagttctcagagtttcgtgagatgcttacccatatgaacaccgaaggacgtttgctcccagggtatgtgatatgtgatctccgccataatctgatgatttactgactgactgatcttttagaatccggctgcagcaagatgagatctttgaccggatcatggaatcaacctttctaaagccctggggtaaagccaaaatcaaatccctgctgagcctgatgcccaaatattccgccaactttgagtaccaagtgaacaaggattcggtaattcgcgtggaggcaaaattctctcttcctcttggctcgcaggagtttgaagtcaacggagtccgttgtttcaaatccaaacagatcggtgctcctgttgatcgtcagatgcccatgcagatcagcatgattgactttgaaaggtttgtctacccaatatcctttcggaattttactggaagctaagtttatatataggtccgattggcagcttgaagtgaaggctcttgaactctgccccgaaaaggagatatcccccgagctagacaaattcatgcgttctattgctttccaatggaacccgagtgcaaagagcattggatctgtcccccagcgcaaggcgaggttctcatatggtgcgccagtcaagcgtttcgtcgagaaggccacaatccaactccaagtcaaagactcgccgcatgtcttcgagctcgcccgcttcgacgagtacacgtacggggttggtcactggtcgatgacccccaaagtgtcctggggtgcatcgctgttcaatcctagttgggatgatatactaggtgagcaggctgatgtcaaggctctcgatatctccaaagaggggtgtctgtcggtgttctttcccccgccgggagatgagcaggaacagacagaaaagccgaaaacggacgatgagctccgcaaggaggccgagaaccgaaagatggatgaggagaagcagctgggctctttcatgagcactgtccagcaggttgcgcggatgctaggaaatcctggcgctgagatgccagacttccttgagaacgatcttggaagtctgttctagtcgatgtgtgcaaatcgtcccaaatttgtcgcatctcatgcgaccacaagggccaactcagaataataaaaaaaaaagaaagaaagaattaaaacgagacaaaagacaaaaacaacacccatatcataaccgtccggcttgctaatcaagccgagatcattaggtatgtagcaataacagtgccaattcagagttattcctgttcccaatatcggagaactcctttagccctagattcgtggtggattttctcgttcttataattcctctccagtttgcttgatccaaaatggtgagacagagacctgtatattatttggatttttctatggtaagccatgtttggcctgttcgtaccacacaggtcgaatttaaccctgaggagcaccctctgagagcaacttctgcctcaatgctgtaggaaagaggttagcaagcgaaaagaaatggtctcgcaaagcaatgcgaatcccggctcctattatccaggtaagggtcgactaactctcttccgtaatgcgcagttgcgagctcttggtctgtacaatcttctccagctcctgcaagtttgcctccagtcccttgaccttctcaccataaaatgcgaccgccttaggcgcagtctggaagaagaaatcatcagcccaatgaacccgatcaccgatatagccctgccgccacataccttctcaacataaaatccagttccgacatcaacaagcaccttctcgcgatccgtcaaccggcccttgacgtacagggagctggtgaggggcacgaggatctcatcacggccatcggttcccatcttctcattcccaatcacgccgtcgttgatcgtgcgcacacagtcgcggaacttggcctgggcggcgcgcagcttcgtgtgcgaggtggtcaggtgttccaattcggaggtgaggcgggtttggagtgcgcggagctgagggatggagagggtggcgaggttgactagtttctggtagttagcatgtatttatcgccatatgacacagatagccggaagcccgcgctgtgtcattctggtgatggggggaccggtgacgcactgccttggggagctccttctgatggggcgttttgtgacattttgggattcggaaagaagaatagggtatggtattaggggggatcgatttccgtgattgttgtgttattgtagatcagatcctcgcattgggaccgtataggtggtggggggagcttcaaaaaactcctgggtcttgttgcgtggtgatagtggggttaagtgttggcaggcggaatagtggacggttgtgtttatacccacgcacttgacatacagcaaagatttgcttattacctcatattgtatgagcgttacaatttgttaaaagaaagctgtcagtatattatccatatattaatatatattaatccattcattcatagctacaagtactctgtaggtaaaatgctatctgcggggaaaaaaagatcactccgaagttctccgctccgctccgtaatccttcttcaccacatatcaatggcgtcgagactggcagcatgtgaagcttgcagaaaggcgaaggtcgcctgtgatcataagcgaccagcatgtactcggtgtgcaagcaacgacagagccgggatctgcatttaccggacgaccccgttcaagagaagaagagcggagagctctacacctctgcagtctcctaggtaggtaatgcatattcatatttgctttactttcacatgcttatcaagtctgcagtcggctaccaccggcccaaccatccttcaccccaaggaataatccctatccaaacccgggctttctggggtcctctagccatgtcgctattttcaacgaaatttccccgcaagactatcatgcatctgatacctaccaagcctccgaggatctcacgatgctgatgcagttgcagtccactggcgagaatatcttgttaatccaaggcgcggatgtcctcagacagctgttcaacacatttccgctagccgccatgaaagattttgttactttttggctggcaacgggagcgaatctagctctggcagagccttttaccgagaagtgtactgaaaatatgacgcgcctgtttacgtccttctcacaggaagataactggcatttggcatatgcccagcgtctgacacaaaactcccgggaacctttgcagtttgacagcacatccgatatggaaagtttctccgcccagtttctcgaccagaaattccgatgggaaagtctaggcatcttcctctctgccgtgagccgagcagcaatcgctataccatttttcccgccattgttcaaaaccgaaaaggataatttcgtgcttcggaagctctctacaagacttagtgatcttgcgttagatattgttctctcgttggattgcttaaacgacctacaactggttctacagtatgagaactttattgtacacacccatgttgatggggatcaaagtaagaactcctcgttgattttgtctgtagaaacccgcagctcacagagaatccaggctatcactcttggagtagacttggaggtgttctgtcgtccatgtttgcccttggctaccatgagaatatcgaaaaaaccaagccaccaattccgacattcctttcggaattacgaaaagcagcttgggccaccacgtactcagccgacaagaatgtggctattttccttggtcggccacctcggatgagcaagcggttctgtcacttccaattgcctttggccccgacaagctcggatcaggttttcaatgcctcacccgttgaggacgaggtcgtcagatggaaaatagatacaccgatctgctacagggcaggtattcggtgggcgaccctttgctccggactgaaagaagatgtcctcgaattgcttcgattaaagcagcgcgagaatttcaatcggaaagctaggtaagttagcgccctccaatgtgggaaccactttctcatcctagtgtttgatatagcgtcattcggcaaaaggctgaaactcaatgggcaaatctaccttctcaattccgactttcgggccctttgaaagaatgttctggggatgcgttcgaacgtgaccttatagctagcatacgcctggaccagctacatgttctctttctacttcaattgtcgtgcctggataccctgactgagcccgatccgtgtatactcgacatctcggatcaaatactctctcttgtagtggacacaatccttctacgagatcaactggtcaactctggaattggactcatttggaaggtatgtctatctactatcaggacttgaaccgttacttactggactgaacacctattagatcgctcacttcggacttccagctacagggatcatcctcctgtcaatgctgaaagaacaccgtacattaacagaaggaagatcctcgtggtctaaaacaatactcaatctcggtatctttgttgcgcaggttcaggtagggagcatcgttcggcgtggagatccgaactacgctttgatatccaaagcgacacagacgattgagcggttccttgattctatacaacgtgaagggatacaatccccgacacagctgtcaccgcagccaggagagaatggtgattgggctgcgtttttcagtcaggatctgtgtgatttcgagactgacttttgggagaacctcgcgtatcatccttctttattgccttcagaccctattttgcctccaatataggattaatacagtaatataaatgcagaatacatggcgaaacctttcatcagttacttaggcatggagttgaaatcactaaaatctcatttaaagaacattatggattattttatcaagtaggataccaaagatatataacgataccaaactctgccattatctatacatcaaatcaccttcggtcctctactatgatttgtgtgctatatcgagacacgccggctgttgttgaatcgtcataagggagatcactcacctatctccaaaccatgctcctcatcttggtcatctggagtgggttcacgggccttaagaaggaaataatctcgcatcgaagaccacacgctactgtctggttcaacagacttattcttgatcttgtaaggcgtaaaactttcacccatccatgcatcaccatcggcgtccagaatttcttcgtcatttgaagacgaatcacttagagtagtgaaggtactccattcaactttctcctttggcaaccgcgaggccttcgatcttttcttttgtggcggagaagtttctccgtccttttcgtcatcgctagtccgcttgcgtttgccttgttcaatagtacttgtggaaataccgaattcagtgcggggcggagatggagcttctgtagtatcagcagtatagaagtcatctgggataggggaatgaatatcttccggtgcaacaaggagacgggagtctggaggagggtcaatgctaggttgaatgaaaggggcagtagggggataaggggaatgatacccaccggaagcccaaaatgtatccttcgtagcagccttgggaacaggactaacaggaaatactggggcagggacaggattcggagaagcaacaggaaatatagtacgattacgagtgcgaaccggggtaaaagtatgaccagaagtaggaacgggggcaagaacaggaacaggaacaggagcaggagaggggacaagagcacgtgcacgagcacgagcacgagtaagacgagcaggagtaggagcaggggcatgggcaggtgtaggggcagggagaagggaaaatccagggccagggcgaggggcaagaccacccgcaggagcagggagagagaaaacttcaaaaataggataattaggatcagtgactctccatgtgggatcagtgaagcggtaaaatcgaagcacatcgaatatacgctcggtaagctccgctgagtctgggacatgagcaagaactacagctggcaactcatgttgcctagcagtaatcctgcgtctgacctcaaatccacagtgacctctgaatgttccgttccaaggtcttccttgttgaagagcattgtacagaatgggattatagatctctttaatcaggtgttgggtggccagtcgatcttgagtattcgtagccatatcgatgccgagtgctgcccaaataggaccctcatggcttgggctcatatttattcttaactctgcggttactcgagccatactggaagatgctgatgagaagtgggtttaatcgaagtcagtattggactgttgggttggattgcaagactgttggcctgtagtggtttagaattcttggaaataatgagacttgagatggaatatatcaactattaagtaccaaaaagctcctttgtaggctattagattgttgtgaatatggtctatgtattttggaagacataaagagacatattcttctcaaagaacactcttttagaacaaagggatgtgtcaataaaataatcggcaattctaaacaaggcctttatgaggtagttaagaatacaagttattgtttctcttcctgtagaaacaaaggaagggaaaaggagaaagtgcccaagaataactacccctgttagaaacaaaaggaaacccacaaaggaaattaggaatgaagctcgaatctgtcttctaagatattgatctataaatggatctctatagaattaaagtaatggcttttgatgaaacggccacctgcgtggttgaaataactgtaggtgatgcttactgaatacctgagttcatcttgtgaagaagctccctaatcgccatcttgccgctacgctgggctatttcaatggccagctcccttttatagttcaacgtaagttataaactacagatcaacagagttaaaagatctcacggggtcgtcagcctctgcttcgagagttgagatctagaaagacatcagcttgacagagccaaacagtatcctctatggtgccgactgctgtgcaacatgtgtttccctggaaacagtctgtagcttcatcattagttcaggtttacgcggctgcagggggtgcctaggtagtgctcggagtgagtctgtgcttattcctcgcctacttaaggcaaacaatgccgctagaccgccacacttgtgttccaatgatgattatggactgaatatgcttttgtaggaacttattcagacaattcatccctaggcgccgattcaaaggatgagcagctatctctgtggtggcttgaaagcaccttttgtctaccttgggtgattcttcgtatctgaaatcagtttcaccggtagtttcgttgggagcgagttggacctttccgttgcctaatacttattctggtcaaggactgtactagtcctttagcatgttggcgcaaactgtatttttcaatctcactccggaacgaactcatgtgcatgaagcaagggatggctccactagactttctgacagggctcacaaaatatcgtaaaaaccaatgttgatataggagatattggtagggtaatgtaagaagacagcgccgaggatcttctaagcccgtcgtggggctgtgtagagggggtttatgcggaacgaagaaggcaaaggcggtcgaacttggtttcaagaaagggaatagacctctgctgtacacagacactttacccctcgttgactaatattcacccacgtgataatcacatggtccatgcggcagtgtcacgtggtaaaaatcaccaatctcggccatgagcttatgtttctaggctaaacgggaccccggacccataattctatattatgtaatattctgaggtacttccataaattctaattctaatatggcgtgtactccctggctctcaataatggcttccgcctaatgaggcatcctctctccgagacattccggatgtctcgtctcttaccgtggttctactattactgattttacagcgcgtctcaagacggtgagcagggcaactgaccccgagggcacgtacccggcggactccaccttggtgtcaaacttctgttagtacggggtacgtgggattcgccagcctccacctatgttgtatattttttagctcataatttaaggtagtattcaattcggtattttacagagtcaaaataatttaatgtttaaatactaccactctaactctcaattttttttttacctaactaacgagggctcccgagcatgacgaacggcctagaatctggctggcatactgtacctaacatgagaaatccagggttatacaatagaggagaggagttagagaaactcaaagcaatacaaaatacacgttcaatactacggactaagattgattagggatatattaggccgatctttgcgccactgaaccctactagggtacgccctgttagggtacgtccattgttgtatacataactacatgtacatatgtaggtgcccacctagttagacgggatacttttcttgataagatatttgtaatagtctggacacggagtagtccgatacatgcagtaaatgtcataagttacaactcgatatctcaacaatggcggtctatatgaacgattcctattagtatcaaatgagtgccacggtccgagaactccgatgacctgcatcctgaatcctgaatcctgaatcctgatgtgaccctgcgcgctatgcccatttatagcttggccgaaatcaccaaccttctttccccgcatagaacttcgacgtggtcgattgaacgacgatggatgattattgccagacttgggctggtttgaaattcggacaactgttttgtactctttacagcctcaatttacggtcttttgctcgatgtcagtggcgccaaaatttaacatcatggcgtcctgtccgtgacttgggcccgggtgctatgatcccgtttgcgtcttagtgctgacgggtggtccaatgtggctattcctcaaacaaagaacaaagccacatgtttcatttgggggctgatctgcagtttcgctcaccccacggggaaaagtttgatctcttttatattctgtggggtagccgaccttccctctacacttttcaaaatccaagatcttctgaatctgaaagctaccaaaaagctccccatcatggatgaaaagtcgtctaagagcgatttccctcactttgagcatgtgctcccagctaagacagagctggatgaggctatcaaccctgatgcacctccgaggcgccaggcgatcggtatcaacatcgttgagaatccgttgacggtaagtcacaactgagagcctctttcatgttcgtgtcggacatgaacactgatcatctttgggtatacagcgcgtctctaaggagcaggctattatcgatgcccggaattatgccgagtcgcataatatgagcgaatatgccgatctgtttgggcgggctgctgtggttgcgcggagccccaaagagttcccatcggctactgagatcgatgaagaggagcgcactgctcttgcatacgagagggaccataaatggcacggctcattcatgctctggtactcaattagtctatgtgctatcggtgctgccacacaaggatgggatcagactggatccaacggagccaacttgtccttccctgaggaattcggaattgccggtaaaggaaaagatgaatggatcgtgggaattgtcaactccatcatcttcttgaccgcaggccttatgtaagttaaagccctgtgatgatcatttttcttctatcttttgcgactgaccttgtacatagtggtgcttggattgttgatccacttaaccactatttgggccggagaggtgagatttttgtcactgctctctgtctcactgccacgcccattggttctggcttcgcaaagtcatggcaaggactcttcgctgcgcgatttgtgatgggaatcggaattggcgcaaagaacgctacagtgcccatttattcagctgagatggctccagccagaattcgaggtgctcttgtcatgttctggcaactttgggtcgtagccggtgagtatctctaatccctcgtcaaggaacatggctaatccctaatgcaggtattttcttgggcttcgctgccaacgttattgtcaaggatgtgaaagatatcgcctggcgtcttcagctcggctccgcattcattccatccttcatccttgccattggcatcttcttctgtcccgagtctcctcgctggcttatgaagcataacaggcacgctgaagcattccagtccatgaagcgcttgcgagctcatccaattattgctgctcgagacttctattattcatacgtgatctacgaggaggaactcaaggagactcggggcgcaggctatttctcacgtctgtgggactgtttcgccgtcccgaggatcagacgggctaactacggtgcctcgactgttatgattgcgcagcaaatgtgcggtatcaatagtaagttgtatctcgtcgcgtgagatggcctagtggtaacacgttttagtcatttctttctacagctcgaccatcttccgggatgtcggttacacagaagaccaggccttgtatgcgtctcttggctacggtgctatccaagttgtggcaactattccaactttgttcctgatcgacaccaaaggccgaagaaccttgactttgatcgtaagccgttccgagatctcttgcggaatatcactaactattgttcttacgaagacattccccctgatgtgcatcttccttttagctggtggtctctctcttttgaacaagacggataatcatggggctatgattgcaccagttgccttgtaagtttggtaattgttttatctgagtacaggctctgattcatatctccgactaggtttgtgtatttgtttactattgcctattccttgggcgaagggccagtcgctttccaatattcagctgaggtattcccgaccattcagcgagaacaaggaatggcgtgggctgtttgtatcaacaacacttttggtaagtatccctacatcaaacctatcgaacattccattgacaaactattctatagctggcatccttagtctaacattccctcggatgatgactgtgatgactcaaactggcgcttgtaagttaatagtcctagaccatgctgttcaaataactgacccttgctctagtcggcttctatgctggtcttaacctcctagcttggtttatgattttctgctttgtcagggagaccaagcagctgactctagaagaattggatcgtacgttaactacggaatctacatgaccatgtactgacatatatcgcagaggtattctcggtgccaaccaagaagtttatccactatgaacttactgtgtggcttccttggtggatcaagcgatacatcttcagacagaatattgaacgaccgccaccaatcattgcactgggcgacggtgtcaggtaaaagctcatacagctctacatactgaagatcttcagactgtgaattttgggttggcaggtctttttttttatcactggtaacttggtctttcattatcctatctctatgaggtagaggagagtgatctacattttaactgaatagttcggtcgttacatacgcaaaatacatttctagtactatgcactgaagcagtgatatcatatacaaataaggaaccaaacttcgcgtgccttcctctcttgcgaaagcactggtatatcaggtcggtgtaggtaaacaaagtcttttggtaggaacgaatcagcccaacttcaaatttgtaaactccgaggtcaagtacaactcatctcaatgcatattcttcgactcgtatttcaatatcccttcattactatcatcatggaccaaacatctgcagaacgtcaaactttcatcgaagccccggatcaagacacagtgaacccagaagcctcaaccgcgaacatacagtctacactggcagatgatcgatttcagtcaacatccaacacctcactaatcccacatcttgaggatgtccatcataacgtctcaaaatcactaagggtcaatgaagatttgatgagttggtcagatgcctggttcccaggggacgagcgactgtgccccttgtggatggggccttggattgaatttcctcaacttcaagaagagatgtggaacgaaattttcaacacgcccgaacttgtcgatgcccgtattttccctccgcaagtcgccgtccgccacgctgctcacatcctagaatggtacatagtgtattcagaggagaccttgaagatatttgcaaacaggtcagtggacgatttcctcgccacgacttttaattttatggaacaagaggacacattgcgatacaggttcagtgtccggggacaattgcgcttcgaccgcccgcgtcattgctgcacctctgttgcgaatttcggattcgaagagccagcatatgcagtcctgtatattccttcatattgtctgactttgcccgaactggttgcagggttgcacgggacatcaccgatggagaccttcgagaagaaaccaactacattcgaggaacatgccacttacgtagtgtctcgtgcgatcgttcggatctattcacggatgatctgctctggacgccggtatgggtatatctacacaggagaggccttggtattccttcaaattcccccggacgacagtagcaatatcaaatactatctatgtgttcccagtcgagacgtcgtttatcatggttatgattcccagtcagaatgggttcgccgtactactttgggccaaatcttcgctttcgcacttcagtctttggctgccagcccaccaacgcaggaatggcaagacgcagtttaccaaacctatcgtgcgcttgataaagatgactcaattctcctgcctcaaaccccggatgccattcgatttagcccgccagcagagtttctatatgagacctcgttctgggttaaattctgggggaatcttctgcttgcagacatacaaataggcgaatatgaaacctctcgttcacagagttctgagttatcagacgtttgcaagccttattgtacccaggcatgcctccttggtacctttcaaaaggatgttctggatcagaactgtccgaatgctgctgcccatggcacagaaagacatcagattacctcacaggagatatgcgacatgatgaatgaacaactccgcgcgaatcggtatagaggattccaacagctgcacatcgttggtcgaacctgttatctgttaaaagcaacgttgctgtctcatggatacacgatgttgatcaaggccaccagctccaagcggtcacacaggatcaatactgagttgaaaaactatcagaatttgcttccattgcagggaagtaagattcctgtatgtcttgggatgttttcgccgaagatcccatattggtatcatggtactaaaatgacctccatgctgctcatcagttggtctggaattcgagcggaccaacataccactcttgaaacgtgtgagtaccttgaacaggagatgcaaaagcttgaagacaaacttaaggaacatggagttgttcagaaagatgcagcttttcgcaatgttttgtggaatcccacatcacaatcttttgtgatggttgacttggaagatttgaagtggctggggagcgagggaagcgaatccaacggaggctcaattcagtccagtgactaccttggagatgtcggcaagtaacctttgattttggcgctcacaaagatattgtgagtaacagttggttgagttggaagaaaaggcaccgcaaaaattctatatttattcccaacgctatctttatgatgcatgccgtcttccttactgtttgtaaagtcccttggacctgtataatatggttgcaataaacccaaaacaaattgatcactccagatcaaaagtctagtcgacatatattagcattggatgataatgagcccacaccacgaataaacataccatatcaaaccaaacaccacctgcaaagttagactgacttttcccctggttcttaaacccaacactctcatagaaattcaccaaatagtcatgcgcaataaggacaaccttgttcgccccgaaagatcctctcccaagatgctcaaggtatgcccggacgagagctcttccaaccctcttgccttgatactccggcgaaatagccacagagtgaattgcaatgttgtcaccatacttgtgattcccaattagttcatcattgacaaagaccggttcaccatccagtgatcgccaattctccggcattgacatcgatccgtcggtgatacgtgaataaggagatcgcactgcaatgacatgtccaatgagtgtaggtgaagctgggtcttgctcattctcaacaaagagtcccaggcatagctccgggcatgctcccaagcgatagcagaacttgtttcgtgttagaggaagcaatcttcggaattgcttatttgcctcagatctggctctggcttaccttttcctcggagcatcgctccggctctataaaggctttctcgacggctacgcagatcttcacgtcttccttgttcagagtccgggtgaaagcattggctcctccgaggctcgggatgtgaatgttggtttggttcatgttgggaggcttggattgactgatgagaacatgcgaacaggttataaattcgaattgaaaacaacaaagatagaaacaattgtttaatgagtcaagggtatttctatatcggtgggtggagtaaaccggagtattcgggccggagtgttcggcgtggatcacctagtggaggacctcaaatgtgaaatccggagaaaaagtggacattggatcttattgatgcattgattagagatgatctgacgctctattagctacaccgctactgtatatcgtggccaatagcaatcattccaggaatcatgttatcggctgtatatctaagctaaatctggggaagaaaaatgctgtcattttttagttgttgtttggcaaaagcctagtcttacatttataggataggagatgagataatgtacagattcacttgctaatattacatactggcgctttcagccattcacagtttggccaacaaggactgaacaaacgtgtggagtccatccaacggcacatcctccttcacgtcgagccgacggcactgcacctccaaagtctgtttcttcttccacccattgccaacaacaataataatagggtacccaatcaagtccgcatctccaagtttccagcccatgcccttgtcccggtcatcaaggatagcatccacaggcgctgcagtgttgccggtaagactatcatacacctgatcggcaacagtctccagtcccttccccgagactaccacaacctcgtagggcgcaataacacgcggccaattgagtcccttagaatcggcaagtcggttcgccactgcggagatcatacgcgaaacaccgataccgtgacatcccatctgcataggtacgatctgttccttggcagaagccttcgcacctagatccatatccgaagattcctcgagaagagcggagttgacagacacagacgcgtttagtactttgctgtaccgcgttcccaagtggaatgtgtgtcctagttcaacggcagagtggctagtcagcgatccatccacgcactgcgagcaatggtctccgtcatgaacgcggacaaggctgagtttgtttgaagtctcggggaatcggtccagcttggagtaatctatgtccgaggctgtgcagccaacttcctggagcagatcactgagcggcgggcgctggtatacccgaacctgtgagtcataaagatccaacacacgcggcttatgcgtggaggacttgtttgcctttacgtgggcggtccatcgctctaatgggttctccacgctcaggtcgaggtcaataccagcggcggtcgctactgccttgacggcgtgtgagttgacatgccgctcgacgggctccgtcgcgccattttgcatcgagaatttggggtaccagctccgcacgagggtattgctatcgtgagagatagccatccacatgccagttgagattgttggtccaccttcgacaactgcatcatcggtctggaaaccaggtgtcatggtctcttcggactcctcagcgatgtgcgccttgccgtctgcgagttcttcgttgtaaacatggtcacagtgcgagcagctgaccacctcgtcctcgcccttcggactgatgaagtggtactcatggctcaatgagccgcccatatttcccgagtctgctgccgcgacgaggtaggggatcttgagttcgttaaataattctgtgtaggcatttttgactgcatcatatgttttcattgcttcggtcagactgtagtcgaatgtatagaggtctttcatgacgaactctcgcccacgaagcaggccctgtctgggccgggcctcatctctgtacttccgcgctttacgattctgtcagtgagcttcataaaaatggacaaaaaaagagtctcactgatttgatatacccgcagaggcaggctcttgtatgatgttgtcagattccccacaagtgtagtgatctcctcctcgtgtgttggggccaggagaaaaggagtgtctttccgatcattgaatcggaacagctatgatccatgttagtgacattatgcaatacagtgggtatgatcaacttacttctgagccatcggtcagtctgccagactgtgcccagagctcttgtgaggatattgaggacaatgagaccttggatgcgcctagttttgatttagttgccatcccatgatatagacagggtatattacataccgagagagcgcatatgcttgtcaatcagacgctctagtttatcttgaacacgtagaccaagtgggagcatatgaaacaccccagagtatgcctggagaccgtcagtgatatttacttgtacataaagatgtgacttctcacctgtcgaaggaatccacctcggactagcaggtcattggcatcctctagatctctgttaacatctggtgatagtcaatccctatcgagtttccgaatggcgtaccattttcaccatcaacgggcttcttggaaattccaccagtaggaatccatatgtttgaaacgcggcttctaccgtcaacctacactgagtcagtactcactgtcaagcacattcaatcaatcttttggaaggacgtacgtgaagattgcattgctgaatgcgcaggctcaaggctagccgccgcccggctatgcgcccggatagaggtcgtagcccagaaatcatcgatcaaggcagcttaaggcgtcgaaattaattattttcgcaattgaaacgctggctgaacacaaaataaattgtagagcaagccgagtctcccttctccgatgtttcttatcgggttggtccgagcgccccgataacgccgcaaaagatttctccgtttaattttctttcctccatcagtcaaccctaaacacaatacaccatggctacagggaaaggaaagcgctcttcgagcgcaaatgagagtgctcccgcgacgagcatctcggctcccgctgccgaacctctgccattcatgccggacgagagtgccttcgcaggtctacgacagaaaatcgaacagcgtttgaagaatcagagtcagaccaccgggaaagggaagaaggacaataacaagccatcggcctcggccaccaatgctttcgcaaataaaggaaagcaatttcccgccaagcccggccgccctcaggattctgcgcaaggcaagaagcgagatcgcaacggcgaggtaattgctcgcgagcagaacaaggatggaatgaaaaagcaggaaaagcccaaagctggcaagaagagcaacgatgacgagacattgcgccaagaaattctagctatgggtggtaccgaggaggatcttgatcttcttgccggtgttgagtccgagtctgaggttgagggcgagtctggcaaggttgacgacgatcttcggaaacagctctctagtatgttggaagcttcagggcacgtcgtgcctgaggatctagcggatgacgaagtcgaagaggagatagagagtgaggaggatatcgaggacagcgaagacaatgcagagagcagcgggccagaatctgatattgaggaagcccccgcctcgaagacaaaagagtctgaatctgtggtgccgaaggagtacctgaagctggtaagactgaaccggcctagcaccacaacccttttgctaacatgatcattatagaacgttcttcctcggtccgactggtacaatatccctatgccctcctccgccggcgacacgaaacatatgaacgccttgccccgccacctgatggagcgcgttcacgagctggccaacaaattgctgcaggaagaaaatgaggagtatgcggcggcccagagggcatctgcttcttcttcccacaagttctactcgaccattatgacgtctggtaccctgagtgataaaatttccgccttgactcttaacgttcaagagtcgcccctgcacaacaccaaggcactggagactttgattagtctcggaaagaagcgcagccgtgcgcaggcagttgaagttttgcggtcattaaaggatatgttcgcccagggtaccttgctgcccagcgaccgacgattgaagtctttcactaatcaacctgggctcgtcgccgcattccaaggtgccggtgggcggtggaacgagaaagaccctcttccgggtggtttgaaaaagagcgacctgattgtgtgggcttttgaaaacatcgtaaaagatcaattcttcgaagttattaagattctcgaaatttggtgcaatgacgagatcgaattctcacggacccgggccgtcagttatgtctacgaacttctcaaggagaagcccgagcaggagaccaatcttctgcgacttttggtcaataagcttggtgacccgggcaagaaaattgcgtctcgggcatcatacctgttactacaactgatgcagtcgcatcctatgatgaagccaatcatcatcaagtcagtggaagaagtgctattccggcctggtcagagctcccacgccaagtactatgctgttattactcttaaccagactattttgagactgaaggaagagaaagtggctgctcagctgctggacatttactttggactgttccttgtgcttttgaagccctcccaccagcctaccgatggaaaacctgcccacaagggtaagactgcccccaagggcaaatacaacaagcatggaaagggatcgaagggcaaaggcgacgacgatgctgccaaaggacaggcccaggacgacgaaatgcgggagaagctaatctccggtgtcttgaccggtgtcaaccgtgcttatcctttcactgactctgattccgaacggtatgttttctttacactctactcccctatgcaaggtactaacttctactagcatgtcgaagcacctcgacaccctgttccgtatcacacactcctcgaacttcaacaccagtatccaagctctcatgctgattcaacagctcacggtgtctaaccaagtctccggcgatcgcttctaccgcactctgtacgagtccttgctcgacccccgcgtttccacctcatcaaagcaatctctctacctcaacctcctatacaagtctctcaagaatgatttgaacgtccgccgagtcaaggcatttgtgaagcgtcttgtccaggttcttggcatgcaccaaccttctttcatctgcggtgtcttcttcatgatccgtgagctcgagaagaccttcaccggcctttcatccttggtcgatcagccggaggagaacgacgatgatgatgaagaggtcttccgtgacgtcctcgatgaggacgacgaacagccggaagccgctcctgttgttgaagccaagaagcagaacaacgtgtacgacccccgcaagcgagatcccgagcacagcaatgccgaccggagctgcctttgggaattgctgccttttacttcccacttccatccttccgtgtctcttaacgccacaaatctgcttgagcacaaccccatgagtggcaagccagatctgactctgcacactctcactcacttcctcgaccgcttcgtgtaccgcacgcccaaggccaacgccagctcccgcggtgcttctatcatgcagcccctgggtggtggtgaagccgccgaccggttggtggaggcgggcaagaagacacagaaccaagtgcctctcaacaccgaagccttctggaagaagaaggccaacgatgttgccgcggaggatgtcttcttccacgaatacttcacccgtgtcaataaggacaaggagaaggtgcgttccaagaagagcaaggacgttgatgacgaagacaactccgacgcaggccttagcggagacgaggacgagatctggaaagcgctcgtcgactcccgccccgagctggaagccgacgaggacagcgacgacgacctggacatgtccgatttggaatccgcgttggactccgaagaagatggcgaaggcgcagacgaggacgagtccgacggtggggttatcttcaacgacgagtccgatgttccctccgacgaggaaatggccgagttcagcgaacccgaggaagccgcgccggccgtcaagaccaagaaggccgccaaaaagccctccaaggaggtcgaggaggactctgacgacttcgatatggacgtatcagacgacgatgcctttatcgacagcgacgaagatctgccctcggatatggaattgggtggagtcggtctggaagagcccgaaaagcccgatgccgcgcccgagtcgaaccgcagcaagcgccgcaagctcaagcagcttcctactttcgcctccgcggacgactacgctgcgctgttggaggacgaggacgacggaatgtaatctgtttcactttgtacaaagagttcgattattccttaccccccgtggggccaaaattcttttttttgcatctggagttgttacaggttgcacacattctgccttactatccctttcattgttatctatatctattctatctactatctattccgcctcgggaccctgcagccaataccagctctttggataatgcctaggaccacccctttctaggcaaaattaggcaaaaataggcaaaaataggcaatgcgatacggcagctgtagcagtccaatcacagcttatggatttgggttcaacaagatcgcaagggatacggagtacgccgtgaccattgaaataaaaatatctcaacgtgtatactaaatatcgcgcatatgtcataacgtaggcaacctttggattgaacacagcgggcatccaaataagctcagatgttttgtgcttataagcgcccgaaaatcactcgacaccatacggagcatatggagtgcgtagtgtggaccttgatgccatcgctgtgggttcgcacgcaagatcggctgctggggccgaaggccagaacgttggatatttaatgcttttttactattttaatgtctcagtattcaacgctttctttgggatgtctgtcagataataatatatatcatatgccacggcattggggctgcatgctccaggcaagggtccctggctagaccatgagtcagcggcacgtggtacgggcgtgtagaaagtgccgatccttccatttgtactccggaggcaaagcgaaatcttcgaaaatgaactccccgagagagatggaccatgtttccactattccatgctgaatcaatgttcgcgagccatatgcgtggattccacttcccgatctggatgaattcattcgaccaagccatccgcatgcggggccagtccaccggacgcatagaataatggacgatatgatatgcgggcgcaaccgactctgcatgagggaagaaagcggattcgggatgcccgtggagcttgggggctcagtaccatggactatgggattcatccagtccagtagtcaggatacatgtagtactttgacttcaggtccagaactgttccttggcacaacccaccgtaagccacggctgatgcttcaactacagaggctgatcttggctctggcaacgtcatatctctacatttcgcctagtagctgaattttgattttgaatttcttttttactttccggatgttaaaggctgtggagtcggaaatgacggtgttctccagataaccatagaagtaccatgcgctgggatcgcaatacccgatatgctgctatactaacgtcaaggttctttttttttcttttttatttctctttccccctttccctctcttccctccattcatatttccactcttcgtttcagttgagaattgcatgcagctcagcgaataccacctcaggtacccgcatttgccctaatccgtccagcacggatcgcttcttccaactggccgatcacccaggacttgttcatttcatttgagtgtaagtgtctgattcatctgttcaaatagaagaaacgataaacacaaaagaacaaaattcgctcacacgcgaccagtatcctatttatcatcttctcgagcattgcatgcatctgcgcatactcaactctcttgactccaccgagttccgacaaagtcgcggttcgtccgctctcttaaataaaaatgactggtccgaaagaatcgccaaatcttgctcctgtgggctgggactatgaccggaaccacaatggcaccgagttgtctgatatgtccgagcaagagcccaagctgaaggacttcgacatcgagagccagccccgccgcggctcgcagcataatgtcactgccatcgactcattgtcgatgaaggaaagtatcggtcgtcagattgacatcgagtcggagaacacaattaaataccggacgtgcagttggcaaaaggtgcgcttcggaccgatacggatattagaggcttgactaataaatttttacagaccgctgcattgctcttctcggagtatatctgtctggctattatgtcctttccctggtcatactcaattctgggtctggttcccggtttgatcctgaccgtggttattgccgccattgtcctgtacacttcattgattacctggtatgatatccctaacagccgcgaccacatgataagcctcggtgttaatatttgtataggagattctgtctgcgacacccggaagtccgcgatgtttgcgacatcggtcagtatctgttctgggactccaagattgcgtggtgggccacagcattcatgttcctcctgaacaacactttcattcagggcctgcactgtgtggtgggtgccgagtacttgaacacgatgtcaaacggtgcagtatgcacaattgtcttctcaataatcgtcgccatcatttcctggtgtttctcgctgccccgcacattcgacacgttatccaaagtcgcaaccctctcagcattttttaccttcgtctccgtcgtcctggctgccgtatttgctggtgtcgaagaccatccggcaggatacacgcccgcactgggagaccccaccgtgcttgccgtcccgctcaagggcacaacatttatccaaggcatgaatgcctttttgaacattagctacaccttcatcggccaaatcaccctccccagtttcattgccgagatgaaagagccccgcgacttctggaagtcagtaacagccgtgacaatcgcggagatcatcgtcttcagcgtcatcggtgcagtcacatacgtctacgtcggcaaccaatacatggttgcgccggccttcggttccctcggcgacgacgtttacaagaaggtctccttctctttcatgataccgaccatcattttcctgggcgtgctgtacgcctccgtctcggcccgtttcatcttcttccgcctattcgagggcacccggcacaagggcaacaacaccgtcattggctgggctgcttggggtggaatccttgctgcgctttgggtcgcagcctttatcattgccgaagtcattcccttcttctccgacttgttgtccattatgagcgccctctttgactctttcttcggcttcattttttggggtaccgcttatatccgcatgcgctcggaggattacggaccccgtttctttatggttcgtggaattcgaggctggctcggattcatttttaacgtctttttgattgttgttggtttcttcttcttgggacctgggacatacgtaagtgatgagtccttgtttggcttggcttgttggtatttcttatgctcctgctaacacatattccttctaggctgctgttatgtccgtcgtcaccagctacgatgagggcactgttcgcggcgttttcacgtgtgccagcaatggactataaaccccctgcagggcggggggtttgtaaaaagttttgtcttcatcttggcattgaatctgttgtgtacgttgtttccaatacaccgggtcattgactccggtgatttcatgactgatgaccgagaagggaagtggtcgatatacacatacgacttgaccacgtttggggtatagaactgtttttcggatggacgcggatggatttcaatgctgtgtatagcttcatggaaagggacgggttttgggatatgctccccttatgtgtatattttatccctgcattctttacagcagttgcacctttcaattcaatgcagatggtcggcctagaggttgcaatttcgctctccgggtttgatttgacatcgccgcggcaatactccgatggccttttggtctaccaatcaatgtagccatgaacctcaattgccttcggcgcaaggtgtggacgataattcgccgataatacttcaatggctagcctcttatatgttgaaacagaccagcgatataacctacagtctgcaagaagtgtacgtccaaattgggcaatcagctaatccccgatcgcctatcaacacgtgactttcccgctcggcttccccgacggcgaattggtgacttctagcagctcatttctttctcttcttctcttttcttttgtcaattcaattcttcagcattgattcaccatgtcaagcgtccgtattctcacacgaggtgttgacctcgccgccgcgagggccgctacccttaaccttccccgcgcctctatcggctccaccgtacttcggcgagagctctcctccgcggctatcgtacgaccaacagtccgtcgatcattgaaagccaatgcactagtcacagacgtagcttcacgtgctgcgaaccaggccgtgcggtatgcctctagctccagcgagcccctcagcaagacacagctctatgacttgcacctggagcacggtgctaagatggtgccctttgccgggttcgacatgcctttgcagtacgcggacctgagccatgtggaaagccacatgtggactcgcgagaaggccagtcttttcgatgttagccacatgtaagtgaatcatctccgagccaaaacaaaccgcaatggctaaccaagttcctcacctagggttcagcatcaactcagcggccccggagccattgatctcctgaagaaggtgactccttcgtcagtagacaagttagctccgaacagctctaccctctcctgcctccttgaagaaggcaccggtggtattgtcgacgactgcgttatcacccgccgcggcgaagacagcttctacttcgttacgaacgccggccgccgcgcagaggatttggcctttctgagcgccgagatcgacgcctaccgctccaagcacggagccgacagcatcaagtgggagatcctcgctgaccgcgcgctggtcgcgctgcaaggacccctcgccgcctctgtccttcaacccctcatcaacaccgcaaacactccctcctccgaaaccgacctgagcaccctctacttcggcaattgccgcgagctgtacctcaccctcccagacggcagcgcaactgcacacccactcctcatctcccgcaccggctacaccggcgaagacggcttcgagatctccatcccgacctccggcgccccatccctaccccgacaagtcaccgagctccttctcaccgacagcagcaaatctcgtctcgccggtctggcagcccgtgactccctccgtctcgaggcaggcatgtgtctctacggacacgacatcaccactgcgcaaaccccgcccgccgcagcccttggctggatcgtcggccgtgatcgtcgcgatcctgtatctgctaccttcaacggcgcttccgttatcctctcccaactcgccagcccgaagactatcccccagcgccgcgtcggattaactgttgagaaggggcccccagctcgcgagggcgctctcgtccttgatatctctgacccggcgaatcctgtcgaagtcggcgttatcacttccggcctgcccagtccgtcgcttggcggtgccaatattgctatggggtatgtcaaccaagggcttcacaaaaagggtaccgagctggctgttaaggtccgcaataaggtccgcaaggctactgtcgtcggtatgccttggattaccagcaagttccaccgtcctcctcagtagagggtagaaggtgtcgacaactcctctaattttatattggttttgttcctttcttaaatgcagggactcatgcgaaatactagcgttttgatttattatttggcctttgtatatatgtttccgatcttatgactgatattcatcacatcaaaatattcttttctttcttgtcatagttcacacaaatttgtatcatgactatcatttttcaatgcctacagagtcacaatcaacctaccaagtcaacatgattatcaagatgcaaagcaccaagctgcccactttcaacaacactctcccacctacgataattcacatcctcatccccaccaccactcccagcctccggcgccaaagaaggcggtaaatcctccagtccagtcccccaagcactctcctccttcccaagaacaagaaccaactccctcccctcagcgaagaaatcatgcccaatccaattccgcgtataaggcacgccatccagggtcgcagactgaataaagccattcccacccgcggcagcgccagtagcattagccgtgttatactccgcccaattcaccgtgcgcagcgttgccgttttccccgtcagcggggagacaatactgacagactcgaagaacggcactgtgaggaggtacacgctctgtcctgggttcgggaatagtcccatcatcgccatggcgacgaacgagcccatggcgcctgagtcgtcgttgcctgggagtccggctggcgttggcgagaagtagtctgggatgtaggcgcgcacgcgggaggtggattttgctggacggccggcgtagtggtattggaagacggttaggaaggcgggctcgttgccgatgtaggttatgtttcggtcgtggaggtagtcgaggcgggtgacgaagtttgtggggccgccgagaagggttattagggtttgcatgtcgtgggggacgaagctgggatagttagaaggggtgggaataaaggtcttcatttgttgggggaagcgggcttacaattgatactcccagatgctggattcgaaggtttcgcccgcggtgttttgcagtgagcaggcgtgtccgctctcgtcgatgttcgagcacgcgaggggatcttggacgccccatgttccattaatatgctttggctggaagaaaccagtgaagccagtgtcccttcctctccagaaagaggcctggtttggtttgaataagttttgccagtatcgtgatcttttctcgtaccgctctgcatcggccgtcttgttcatgcctcgagccatttgcgcgatggcgaagtcgttgtaggaatactcgagtgtgcgtgagacgctgcgcgtcattgtgccgaacccttcgtagtcgaagtcttccacagggatataatgtaactctttccagctgcgtagaccgccacggccttcgctggaccagtcgtacggttcctcctcagcgtccttttgcacagctgcatacccggcatcccaatcaatgccatctctgagacctttcaggtagacatctgccaggacattgtcggcattagaaccgccttgtgtatatcctttgcatagtgacatgcggcagtccggcagccagcctaggtggcgctgggtatcgatgagtgatcgcaccatttgcattaccgaggaaggatcgaagatagtgaggaatgggatctgggaacggaaagaatcccaaagacaatagaacgaatcaaagtaaggctcactgctctgccagagcgggttctcgcctgtgtagttctgggggttgatcatagtcctatagattccactgtagaaattggacagaacggatgaatcgatgtttgttcgtgagacacggatcgggcgcatcttctcggtccatttttcgactgctatctggtgggttgcgttgaagtcaaagtttggaatctcagactctgcatgagcgcacgcttgctctgtgctcatgaagctgacgccaactcgagcgaggaccgtgttgtctgcggcggactcaaagcggacaaatccaccaccctacggaatgtcaatccttgtctctatataaaagaaagggtttcgactcactggaagcgggtacccattgatactgcgggagattttcaaatcatgaacatcagcactggcacgagaattgacaaagatgccactatctcgctgggctgcagggcttttgaagtccgcacagaaatgtaacatgtacgatcccgatccaaagctaggagcgaacctcgcatcaccggtcattcgatttgttgtgttatccaccgagatagtcgcattgtcctggcgggagttcgacagatcggtaaggtccagcaaaatcaatggactggtggtgttatcacttgggaactggaagcgaaacagagacgtatggtgcgcagttgtcatatccactcggacccctgatgccagctctatagcaaagtatcccggacgcgcctgcacggagtcgggcttatacttcgttttccgttggttcttcggatagacacagccattgacatcatcgccggcgcattttgcatagggaaagagagggaaattccctaacgaaggactgccgccagtgccggagtcgtgcatgctggagaatccggtgacgctgccgccctcgtgggcgaaacctccttggttgctttctgagtctgtatcggcgacggctttcgccatgccatatggaagcgaggctcctggaaagacatttcctgtggagaattggtcagtagcatgaatttgactgatttagctgttgaacttacctccgttggcactaccaatcaagggattgatgtattgtagaacatcataatcttccaatagaggggtgtctgcggcattaactaggatgcgactggttgaaaataacgacagtaacaaatatggcagcatgatctaggttgaataaagatgatcgacgcgtcggaaaggctagtatttaggtaacccttcatccgcaactgcctggaatgcgtgcccctggcgatccctgtctgttacattacattctgcatattcccgtatgtggatccggggataggctctcatgttttcgagagtatgtagtgcaaggatgtactggaggttgattggtgagactcgtgtgtccggaacgttaggattgagaaacagtccaagacaagcgagattaatctagtaagactttgccgcaataggcttcatgagtattcatcaaaagcctaatttcttgcaagcatactcaaaggaagaaagatagcatatttcgccaaaggtaggtctcattctggcaaaagaataagacagaaagcatcgtgtcttcacctggctatgccgatttatcaagtaaagagagctgtatatatatattggccgcatccaccatcgtgtttcgccatattcttcttttgtatccccggataccggcttccacgacaacatttatagcaatttgtccgaccttgccataccaaacagcgtaactcggactcccggttagcatctgttctctttaagctttctcggggtatgatcatagcttagtgctttcctccttcgtcaactgcattggcgggacaccggtatcgtgttcccaaaccaacttgtcaatgcgcccattgtcgttgcattcaaacacggctttccagaaaggtgccgcttggtcccagcccacccagcggccacgtctagataactcgttccgtggaagtaaccaagtgaaggtgtcatcttcatagtgttcaagttggaacttttctgactccagcccttgcagcctccagtaaagcttgttgtccaccaaattcacaacaatcttgaacacattgatattatcccagtaagtaccgacatactcctctagtgctctaggtgatgttccgttctttcgagccgagcctagctctcccaccagtgctggataccacttcaagctctcagcgaccgagatgtgggctgcttcgatgtaatcatttctctctgattctggaacctcgagcagctcttcaaggatgagttggccaacccagtcaggaacatcatttagggccaaagagttagacagtacaacaataacactgtcagtgtctggaagtagaatcacaattgcgagggcgccaggtaggctgccctggtggaagagaatgagctgtgagggaacgcctttcccaacggtaggcatgccattggacatcagaccaggattgattccgatatgacctagccgattgggaagctgggctctgacccatccgagtgcgtatgatagctcgttcctcgagggttgatgcataggaattttggcggaagtgagatgagaaacttgtttgaagggagagtctttggtcgctcccttcccggtgatgaattgatcttcaaagctagcggtgaacgttttgtataactccaaaagatcacggatacaggaccacgcgccaccacttggtccaccgaaccaatcttggcctcccttagggtaaggaataggagtagtggatccatcatcaagtgcgttgtagcactgagtgacattttgggtgcccggaggtggagatttaaggtaggttcgatccaagccgagaggatcgagaatacggctctgtacaaactcaaaccacgaaatgccactgacttcctcgatgacataacctgcaaggttatattgaagattgttataggacattcctgtccggaacggaagaacccgcggctgtgaattgatgtatttcagtccatcctttcctggaatgagaacgttgttctcggtaccgaggaccacattaccagcccaagccatgcctgatcgatgagataggatgtccgtgatagtcaagtgattctgcagcgtctcgtcgcttgaatcaaaggatggaagaacgtccttcactagtgtatcccaggtgagtttaccctcgtcgacaagaatcgccatcgcagaggcagtcaaagcctttgtcaacgaacatatgggaaatattgtttcctcagtgacgggtagaccagctgctgtgtctcggacgccaaaacttgactcgtaaacagtgtttccgctcgacatgactgcgagcgagagccctggggtcccgccgatgcgcatcaaatcttcgatggtggaccgcaagcgatccagtcgttccgggagttctgccattctgaatgctgctcgggataatgcgaccgttacggagtagagtgaggaggtcgactaagatagattgtgtagagggggtgcaatcgcgactatgaaatgattggctattcctatagttatacccgcttttcccaccaccctacaatacaacatagtctccttatcaagtcagctgatctgataccatgaagctatttagagattacatgatcacctgatctgtcactatgaagtaattgaaattaattctaccaccattaatgatagagataatttaactctggaaatgacaattgaatgctggatggtagacaatatataattgattaaatgcgaccggtatttaatgctagctatagcttgattgtacaaagaagttgaggtaaggactcagcggggtgtggcagttttcaacaactaccagcgcgggacaggggaatacgagagaatcaccaatcagaatgcgacaaagttcgagcatagaaaaggaacaccggggggggggggggggggggggggatcccgcccccccccccctggctcnnnnnnnnnnnnnnnnnnnnnnnnnnnnnnnnnnnnnnnnnnnnnnnnnnnnnnnnnnnnnnnnnnnnnnnnnnnnnnnnnnnnnnnnnnnnnnnnnnnnnnnnnnnnnnnnnnnnnnnnnnnnnnnnnnnnnnnnnnnnnnnnnnnnnnnnnnnnnnnnnnnnnnnnnnnngggggggggcatggatcgctgccacccgtccctgagtccaaacaagaagcctttttaatcactgaaaagaaagctgagatgatctacaaccccatgttcttcttctttgcctcccggtaatcgactcacaacctcagccggcttctcaagactaagctccacaatcttctcgttcccagagagcttccacgagatcatagctagattatccttacccagcgccaccttcgcttccaacgcttctgccaaccgtagcctgggcctgaaaaatatcttcgatgagccagcagcgaccggctgaacacctgccagctcagtacagtactcataaattggcacactcccccaagcatggcaatcagacctttgtctaacgtcgtcctcctcccaagtagaaagattattcgctagcatcccccgccacggagcccacattctctcccaaaacgactcgtacaaatcctcgccagccaaagaaaatgccctgaatgcatagaaccgcatcatatacgaacaccttgagaagcgatcattggtaaacgattcagtcaagatccgtgcagagtcttctgcccttgccgctccacaaataacagcgaagacctgacagtgctgagaatacgacagctcatcggcaacatcggctgtcgagtcggtgaagaattgcccatcataacaatgagcccgaatagcccctagaagcgatgccgccctcgcttcatactcagcagcatgtcctggccgaccaacatcacgcaccagaccagcaacattttgtagaacccacgcgtacaacatactaaaataagtgtgtctattggattttcgtccggaggtcggaactcctttgtcgggatggtcgtccgttgcaccccaggtcgtcacccagtcaacatattgccagacgacttcaggcagtccgctgaccagacccagctcgtcgatgtgggcatcgaaaaagtcgagaataccgtcgatacgcgggatgaagcctcgcgcgaagcgggtatcgccgaagtataggtggtggtcgcagacctgcaagacccaatacagcgagaacccagctatgagttgcggtatttgtgaggggaagcgggactgtgtgagaccttcgggtgtgattgaggctgcaaagtttgtaattgcttggcgcatcagtcggtcgtcgcccgagaggaggtagtggaatagaccaacggagcggctgtctccggagtatctgaattgttagctggggtatggatttggggatgtatgaggcatactgtaattgttcgtagaatgggcaatcggaatacccgtcgaacatgcagtttcgcattgtccggatggaaacggcccagatctgctcgctgtgcgcgtctccgggctctttccagctggctttgacggccatggggtagttgacctgagtagcggcaaatgataccagctcgattggctcggggcctacagtgatttcgatcctcagaagacgaaaggttcggaaccaaaatggttcgtatatgacactttcagtgtcaggaagattaagtgtcacttcatcgtatggtccgataatgtggccaacacttgcattcagccggtcagccttggagcggaagaaagggtatgatcgaggctcaagctcatagccttctgagtgtgtcactttgagtctgatctgagaagtgtgtttggctgctttgaaggcccatcgaaggaatgcagtcgaatggacatcggcttgcacttcaagtgtatgagttgagcttgcaggaaggacgatagagtggtttgttgcgaagaaggctgtccaatctctgacctcgatcacactgtcgcatgctctaatggtttttacaacggctggggttgactcgggcatggggatagagcgtggacgtagattccacggcggaatatcgccattgagggtctttatcttgtaggcaaatggtaccaccgcaggaccggggtttgtaggaacaacgcgctcgctgatctgagaaagaatgtcagtgcaattcaagagggcttcgatcctgagccattctcacatgaaggaacacatcgtcagccaatcctgtcggaaactcaatgctttcatccgcagatgctctccaattcttggaagaagcaagatcgacgaccccctcgtctgtctcgatatttccaataactgtcaagcctggaagagccgtccgcgcaaagggtattgcgctcctcgaagtcgcgaagtaccggacaaccgtaaatcgaatctcattttgtccttcttgcaggtagggtgcaatgtccagcgtgtcgtaataccagatcaaaggactgctgcgactcggtccgacggcaatatgtttcccgttcacatagagcttgtagcgtgtatcggctgagaaatgcagtattgatttcgtcggtcgcgacgacaagataacattccgtgtaaagtgaactatcttgccagctgtgttcgcgtttgaagagtcagtccaatttggaacccagatccagttagcctgaagctcgtcgattgtctttcaagccacaataagtcagcaatttattccatatagcttgagatataaggaaaataccttttgctcctctgttgagaccatctttgcgcattgtttccgttcatctcgggagttccgacgagtttgtataacttccggcggggaagaggccgggggttcggaacatctcacaacgagaagaaacgcgattgaattaaattagctaataagagtttgcaaataatagcttttaggctggggggatgtattcagccaatagttcatgaaaccgaagatgttgaggattctatcacaataatatatagaagtcgtctcttcgccgactaagggagaggaggtatttaaaaagacataacaaggtcgtataaggggtttaccattcttgtatagtttaatttaagtataacgatataaccataatgtagtatcgcttacacttaagctgcgactacctcatactcctcgcagctgcacttcagtgacataacccttgaacttccgaagattgaccttcttctcgaacctagaacataaaacgtgttatccaaatccattaaaaggaccccaggtggaaggttgacatacatctcatcaatctcagccggtgttcggcgtgtcacctctggaagaatgaaccaggcgataattactgcaagtgtgcctgtacccgcaaagctataagaggtaggctgtcagcattttgcagtggcaacccgcacttaaagaagacggcaaaagactgacaagaaaccagtttttacaccccagtgtgagataggcgcattgttgatcatcaagggcgtgcagaaactgaacatgatagcgactaaattcgaggatgcaagagcccagccggctgtttttgcgcgcaaacgttgctgggggatctcagcggcgtaggcatagccaatagccgacgcaccagtagtagacaaagttgccaaacaagcgaaaaagatctaggtacagttagcaagttatccaaggttacgccgtcagaagggcttgccagaagtgagctggttgatggcttggtgtaatcgaagcagccaataattccgaggcataaaactgacacagatgtaactgcataggggtagattgtcaacggacgacgaccaagcttgtccgtcgtggcagcagtcataatcatagatatcaactggacacaagataaaatgaccgttaccgtgaatgggtctttgttgccagcatattgaactagaacgatattagcaaagtgaaagaacagtatgaaacgattagtactcacagaaatatgtagcgtaggtgttaaacacagacaaaccgacaagctgctgggcaatcttgggccaagctgcaataaagaaacgaatccgattgcgaccctggaaaacagcccatggtccctcttcggagttacgctctgcgacggtgcgctcctctgcaatggtggcagtcatgatttcctgataggaaattagaactttgttgaaatacgattgacagaataatcacatacaatctgctcgtcaacgctgtattcctcgatattgccattgcaccgagttaggatcttggctgccttgtcgagccttcctttgctcacgagccaccagggagattctgggatgaaggcgaagatgatggcaatgataccaaccatagcccactgaccgttcatggcaattgtcagtcactatcttgaccatgaaagctaaatcacacacgggacaccacgaacctgtgtatagatagggactcggaattcatatgagttatttgcgctgagttccttgagtgccactgacgcgaagatctgaccaaccacaaaccagctggaaaagaatcagcatataaagcctctgaggtgcaatcctcttaactcacaaactgtacgcgttgatatagaaacctcgcagctgagttggggcgatttcggacaagtagagaggtaacgtggattgcagcataccgacacccattccagagaagagttttgctgcgagccagtgatcccatcttgttgcgaaagattcaataaacacgctgatgacaatgtcgagccagattatatagaacgcgatttttcgaccgaacttctctgtggcatattggaggaactaaagagtagttagacactcgccagattagccctgaagatcggaaagacgtacaacttgaccgatagtttgaccggcggattggataccaccccatgcggagatgtatttgcctgcaatgatggatgtgcctggggaagccatctgtcgaataaaacccttgttggagacaataccgccattaagattaatttctgcaaacagatcagtataattagaagctcataggtctccaaaagcagtagcttacggtaaccatccagcgatgcgctaaatgccgcggtcatagcaatcagcgagacgatcttgaaccgtcgcacacaatgccagacaccaaggtcgtcttcgcgagatcgcatgatgggccccatgctcttggtaggcatgacattttcttgatgggagaaggcatcctcgatgttttcagtgttggtcttggaactatccatcgtaaaaataagtagacaacagtgtgtaccgagaacgaaagttgtaagttcttgtcaaatgaacatgagtagctggtattgctatattatcagctctttggtccaacttagagagctaacaaatattgatttgcgaaggactcagctattccaaccaataaatctgaatttacaaggctaaacgtaattcttagaagctctttgttcttactttaccccagattatacatcaaatatacgaaaaaattgactatcgaatagaacgcaacccaagggcctctacccctcaaactcccactagccctaaacagagaatccccggcggcataacgcccataggagggaattcaacccctccaaattccatacatccccaaccttcggggttttcggaggaagactgcccgagctccttcccggggaactaaggccgagtaattacaggtaaaccagaagagcttccgaagctgcaacagtgaaggttgctttcccgccagagacagtgactgtctctatgctctctataccctgaataatgcaagtgccgttggcaaatgtctggcccgcaacggtcgggttctgaccttgatcgacccgagacgtagcatagggagcagtcagccgtttagcagtaacgcctgaggaaaaaagcccagacagtgtatatatttgcgaggaccgtgttccgctggtagatatatagtagtcggaattgtagagaaggacccggacaggaacgctagccttgtagagggcgtaggctgcatatgctgtatcttggctatccagaggcgcaatctggtcggcgttggcgagcgccatgctggcgaagtaagcaccgtagtaaggggatcctatgtcgtagcggccccaccagcagtattggccttgaaagttagcttgtgggtgggtaagaagttctagataacttacagtttccaacggtaccctggtggaagtagagggcatttgtgcccatgaggacggtctgcatcacgtagtccaagatccagagcgcagcaccaaaagtcgggctgataccaccaccgccttgggttgctgaatatttttagtatttttatcaagtgacagtgagcagtaacgtacccgagttagtctcgccgaagatatgcggtttgcctttttcagcagctgcagaaacttcagtagcataaggcttgatctgggtggcaatactgctgtggcccataagagtagcaaggtcgtaggagccagatgactggggatagttgtgagagcaataatccttcacatagtcattcgcatcactctctttcgcggtaaggctagcgaggctcatgggcgaagtgccaaagtagacacctgctgagatgatatcagttgcagagagatttccgcacatcgcatcttgccaggtgacttgggatgattcatcagctgcagctgtccaggatgcaccattggcaataggatcgctgtcaacgaaaactgaacgcttaattagcgtctacacaaccaagaataagtaatttgagacctacagttgggctcattccccagttcaatggagtatagattgttcattttgctctgggcgagaagcgcggccgaaattgtgttcaagatatcgcccaaacgacgattcaatccaattataacttctccggcatagcctgcagccaaagagatgaaggacggtccgtaagtcagagtctcgggcgcagcacctgtgctggccactgtataagtgacagcttccgttgatgagctattgtatatcgcgcggtccctgcgtactgttaacaacatttattgaccaataaaagcatacatactgtgttgtgcctccgatccgcataggaggccatgttcctgtcagatccttgaggttctgcagacatgtcattgttgattcgacctcttgaatgtactcagggaacgcaaagaactccagacttcacggtgagtaattaaatctgccaatggcttagatagagactcacgatacaccaactggagctgcagagagctgctggctagaatttgaaggcggggatatcggaacattgaagctcaaactcaaagccgaagccgcgaggcctagaagcaaggctgagatgggaattgatgtcatggcctcaaaatgtcttccgtcgatgctagataaattgagttgtaagccaaagaaatttccaagacaagataaaggtcttgagtatacatatataggctataatgcaatccggtctctataaggaaacaatccggggaaccccacatttcattattttcaatcttactgtcgggttttagaatactcgtgctggtaaatatcaaggagcaattgaggataatataattgattgaaaaattactgcttcttttcccgttaaaatgaacaagggaagtcctgtactttgtatttcacagacttcctgtggtagcccaatatacattataattgtatccctgggcatcatagaaagggctcagtgtaacatgtcctccatcggcgatggagatgaagtcaagaccagaagcgccggagcgtttgatagagtcaagggcgagagtaggaatactactcagcgtttggtttccgtaattgccgcacaagatagttggcccataagcaactgcagcaatacttgaattgtcatttgcagccactgtacgcagactcatgggaaagcggatcacaacgacatctccatcggcccatatacgcgagatctgagcgtaagttccgggactagccttaacatcaggtacagcttttccattcagcgtcagctctgcgcttgatgcccatgtagggatgcgaatattcatcgtccagtgaccactgccgaagacttctagtttcgatttatccccgactgggtaagtcgtagactgtttcagggtaatacccatctccggccatttcaggacagaagacatgaacaagttgacaaacaacgtggagtcattgtagaagtagatcgagtccatcaactttgtgttcgtttcgattgctgttccttgacagcaccagaatgagtcgtagtccgtactccaagtaccgccaccccaggcgggaccaacaccacggcgacctccggcgttgagaggagtgaagtaagtgatgtggccatggtgatcataagggttctgttggcccaacaggtggttgagtaaggcgttttcgtagaagtcgaaatatgccgagttctcggaatcaacgagccacagctcgcgagtcagcttgagcatattataggaattacatgcttcacatgtatcattgtcaagataatcggcgatcgcatttggggcatggaagtgttcggcttggctgttaccaccgattgcgtacgtgtgcgatttgacatttatttcccaggcattccgggcaatatcaaggtagcgagattgtccggtggctttgtattcgcgagcggccccaatccactttggtacttgagtgtttgcatgtagaccgtcgaactcatctatgtcggctgcaagggggtcaaatataacgccatgatcaaagcgttgggcaacggtaagccatctcttgtcaccggtttggtggtagaggtcagccatcacttcattcataccgccgaattctgtttgtaacaacttttgcattgcatcgtaactcaacggttcggtgcgtttgtcgacccagctggctaaggacagtaagacgtctcgagatatagtgtcttttgtcaagcgccagatgtcaaggaggcctgcaagagtcttgtgtaccgcgtaatacgggacattgccgtttgtcagggtgctgttttcgagttttgcaaactctgattctggaaagccagatacatatccgtccgtgaagccagcagccttgttgttagcctggcatttggccagctcggcaacaaagtaggtcgctcgatcataacatgtttggtcgcggagtaccgcataacattgagcccaggcactgaggaaatgaccctggatatgcgaacggaacggaaaatccggagcatcccagccaccattaggcgttgcttgttttgtggataatccgtgggtcacccggaagacgtagagtagtctgtcgacgtctatttctttcaaatatctcagggtccggccttggttttccaggaagcggtcttgtgtcaattggactccaccaagatcgaatgcaaacgcctgagctccaacatccttggtatttgagctggattgtccatcgacgggaaagggaagagaaagaaaaaagcagacgaatatagcgagaggtttccaccaatccttggagtgtatcattttgaattgtttgggcgaattgaaagtctggtagataacctagtgattcagctattctttaggcattgtctgaaacacaaggcccttttatataagatatttccggtgggataagacattaatcgcattgttgtatatacaatgccaaggatctccacacaagtccatactccgcaccccatacttcttctcaaatccggagaattcatgcggggatatattttgcggagaaatgccaccggactcattcatagtcttctaaaggaaatatgccggggggcttgtagatcaatttacccttaagagcggagaatatcaaaggtcaactaaactttacaagagatctctagcctactataattctaagccaatcctaaaagacagattaaatctgatagactacaagttgatatctctcaatagagtagtctgcgcgaagatttcttatactttcatgcttgtttataggtgatatctagtctctttggcgaggttgaagaaagttcgtggcattgtgattgcgatatacatgcataggtctggctttaagcaatataattattatcattcaatgataagaacgaagcgtttcgatttgcttgcaagtgataatgttgagaagacctattattagctaccaagtgacactaaatcaaataacaccgtggctgttgagatatggggttgccacgttactatgttgtcttgttccggagtatgtacacatgtgtgtatttcgattccgaagtatagagtcagagaaacaataagagatcccatgtagttttaagtcttaataccctaatcaaatataagtctcaacctccgaagaggatgtttcggcgaagtcaagatgccgaggtaaatctcaccgaaatccacttcgccttatcctcaaccactgttttctcaacaacttcgccttctagatctctaaatttggatcgtttgctttaattgttttttcgctctttataatttatgatgttccgctcttttacttctcttcctcactcttttcgcaatatttccctcccctccacgctctctccctcacgactggtattccgcaactctctacccgcaactcccgctgctccgaagcgattccatagccggtcttactctaccggtaagttataaacagtccgcgtcctccaaaaggagctaacccggtaatcgtagcaagtccctcggcctctatctatccacccccaccccaccaaaaccagcgctctcgtctccgccgctttatcgggttcaccacgatcgctgtcttcacattcaccatcgggcttacctatcaaacccaacgcaccctctcacgcatcatggcgaccccaaatgacgaggaggtcctgaccgcattccttgacaccgactccgagatcacggagatcgagaacacaatccgcactcaccccgtcgcagaggccctccgcgcagaccccgacttcagcgaatcgcgcccacaccttacaatcccgggccctctgcgcgaacgcaacctgacagccggaacgctagcaggacccggcaagattgtcgtgccgccatatgtattcagcgagcgcgagggcaagaccatgatctcgctcatgtatctcggcggcgatgtctgcggtcaccagggtattattcacggtggtctactggctacactgttggacgagggtctggcgcgttgttgcttccccgctctacctaataaggtcggcgttaccgccaatctgaacattgattaccgtgctccggctatggcgaatcagtatgtcgccctccgcgcggagactgttaaggtcgagggtcgcaaggcgtgggtggaaggtcgtattgagactctcccgattgatggttcggagcctgtggtcctagttgaggctaaggctttgttcattgagccccgacaagctgctgtaagttgaaaatgttggactttgatcttttcccctgactaatttccccaggcgctctcgagtctctacaaggtggcgtgattgggaaatttctgtcctttccgaaatttctgcatttggttctcgttcctggttcctggcgtaatggcgaattaagagaattagacctttcatatgtaaatggtattagaattgagtgaagaaatgaatattatcagtaatatcaaagactatacaagattacaagactataagactataagactatactatagaatatctctgttgtacagagtataagaacggaaaaacgccaagcaatggcgacaccccgcggtgatcacatcttcttctgtgacgcggccgtcccactgcccctccctatttctataacttttccgggatctcaactttcttctttctttaatccaattaacctccaaaatgtcttcgtgagtcccaaccgaacccccaatgccaatctatccaaaaaactaacaccaaacagcaacatcaccttccacgccagcgccctgacccgcagcgagcgtaccgcgctgcgcaaccagcaaggtctcacaatctggttgaccggactctccgcctccggcaagtcaaccctggccgtcgagcttgagcaccagctcgttcgcgaccgcggcgtgcacgcctaccgcctcgacggcgacaacatccgcttcggactgaacaaggaccttggcttcagcgaggccgaccggaacgagaacatccggcgcattgccgaggtggccaagctgttcgccgactccaactccatcgccattacgtcgttcatctcaccctaccggaaggatcgtgacactgcccgccagctgcatgaggtcgccacgcccggcgaggagaccggcctgccgttcgtcgaggtctacgttgatgtccccgttgaggtcgctgagcagcgtgaccccaagggtctgtacaagaaggctcgcgagggtctcattaaggagttcacgggtatctcggctccttacgaggcgccggtcaaccccgaggttcatgtgaagaactatgagcttcccgttcaggatgctgtgaagcagattattgattaccttgactccaagggttacttgccttccaagaaggagtaaagtgcatttctttgggtgcttttctttgggattgggatatgcttgagattttatggatgtatctatggtcggctttacataaaagagtcctgtacagcggattagatacggtttttttttgtgcttgattcccctcccacttgctgtacatactgcgtggacaatatagatcgcttttgcacttgcattttatgggctggggcgagaatggacaatgggactcgatccccttttgctattcgcttgaatgtgtggtcattgttgaaacgaagaaactaaaaatatccaatgctagtttgtgctagatgtaccaaagtggtatatgtacgcaacgtcttctcgcagctttctatctcctatgatgcctcaaattggccttagttgaactcgaattcataaaacacatacggtgtgtagtctgcgctgccctcgccaccggggtgcatctcgccaggatcatcccgctgcatacggcccttcttgtctcgcccgaaggcattgcctgccaggtacgagtatttgttctcgaggttttgctttgcgcgatctgcttgcttggcagtttgtgtctgtagaaagtaaagaacgtcagtcgttgccacggtgaaacggaaaacagagcagaagagaacatacccggaccaaagcgcagacgaaatccagcggcaatccataccgcagcaccgtctcgacgaacactctcagaaccaaaatgtgaatccagaccataacagcctcactccaagccgtgcgaccgagtcgcagcgtctcaccccataccttacgctcatcaccaccaacgcgctcgacttccttgcgctcctcctcctttccaccctcgacatacttaaagtcgcggggaatccatttctgttcacggcacttatgcaggaactcggcgttgtgtttcttgaacgctgtcacggcgtacagcgtgaactcgctgtcggaggcgactagctgcgcggaccgcgggaccaccattggcgcaacggtctcgtaggtcttgaggaagtcttttactagctgggcgggcacggcgacgaggtgggtctcgatgtattcggagccctggatgatggttttcgggtcgaccactgaggcgagggacttggttgagagattgcctctgtatagagcgggttagtcatggttatgtatgctataagcacacgttgcagtgccatcatagtcaacatacgtttgtttccgctgcagtgtagacagcgtgttcttgacctggttgtattgggagtacttgaaacggatgtcgttgtcgatgctggccgcttcctatagtagacaaaagcgcattagcatataactccaagccagatatattcctcgtttccatgcgcggtgcaacaaaccttctgcaagagatcaatcagctccgccaagggcttatcggccctgtacttgactttgttccattggaaagtacgtaggtactgatcgaccggctctgtaggcagtcagaaccagaatccagacatcctcgcagactgtgttttcccctccacagccagatcaataccaagctggagacatactatcgttgacgaccttcatctgctcaatctgcgcctcgtcctcaaggatgttcttcaacgcatcgctgaccttggcaacgacactctgacacgaggcctcgagcttggccagctcgtccgcctgctggacaagggcatctagcgtgccgatcttgaactccgggattgggaaggagttggtggagccattgtccgaggagacggtggtcgagactgcttcgagggcgtcgtcgcggtggtgcgaggggacgatggaggtagggagagaaaggaggatgtatttgcttggtttggacatgattgattatgtattcgcgggattcaagggccttcgacgaggcttgggtgcgttttcggggttgaggggggctcgggtggcctcgatgtcgtaggcggtgggggcttgtaccactatgtccactctgccatttacaggaactcacttatacctccattattattgacatgagacttgggtaatgatcgcattggccggaaattagataaaagatattatattatcgatacagcgatcagaattcacgaagaatccctacgaaaagctctccatgtgtgtgagtatgaactaagagaacgttcaatatgaaaggaaagatgcatgaaatcatgatctcatactaaagcctgaataaacgtacatgaacgactttgcagctgcgtgaactgctgaatggaggtgcataacataacgctagaacacgattcaatgctcgctcagagtcaaaaaacaaacaaacagtaaaatgcctcaatggacaggaagtaaaccacacacgaggaatgttggttaccaaaacagccagtgaggctagattgaaccatagcgttagctgggagaacaggttagacatgaagaaagagaaggcaagacagggtatctttatcgagcgtacagcgctcgtaaaccaagtagagaagtagagcagaggtgagaggaactagcctgtacaaaagaatagggggagaaaaaaaaggttaaagcgcacgtgggattagtcaaagaaaaattgatgattagttagagattgtacccaagaactgggaaagccgaggcacctaggcatgatggtaggattatgaaagattggagtggaagtgagtacttgggaagagaagtatgtacttcagccgatcctagccctgctgcataccctggccctgctgcgtaccctggcccttctgcataccctggaaaactttctggcagttctccaccaggaacttgagaacgtcattcttcttctggacgtcagtcatctcacgagcgagactttcaggtcgcatgattgtcggcgcaaagaccactgcaacattctgactggtcatcagattctcttcgtggcgatcgacaacgcgtttgagatggaagatgaggaactccaggacgtcgcggtgcacgcgaggcagctcgaggagactcttctgcatgagttcaattcgcgcggacacagggttaacctcggcggaatcgatcacaagttcataaacttcgtaagtgatcaaggggttaggaagctttcggaaatactgtttcaaagtggatgtaacagcatggatatcgaggtcgggatccgagatatcgtaatcaaatggagagcgttcaaagccttcgcggatggtttggatgacggaagcggcaccggacttgcgataaattccttccatgtccatgcctgattgtatatgttagtataacgaccaaccggataccgacccacaaaacatacctcgcagttcaacctcctggatacaccgcgtgacgatggctggaatcatgcctttttcgtattcctggcgagcctcgagttcggtaccgaaaagagctgcgagagtcattagcttatactgatataatcctgaactgtagtatcgggcacataccatcgggggcagcttcaatcaacacaggcacgctgtcagcttgcgacatctttcctccctgcttgcctctttggtttccaaagaacccaaagccttggcgactcgggtcctgagtttgggaacgcggtataccaccgccactctcttgtccctgtcctccttcgctggacatgaaggctcccttaagacccttgacacctttggcaacgttctgtccgccctttttccagttgaatttgcgaggctggcccttgcgaatgctgacaacctgggggcctggcacgacagtggctgtagcagactcggactcttccgaaatgtgagtagatccgtgatagtcgttgaagggaggtttcatgacctcaatggaggttgtggatctctgcttgttgtgcgatatgccgaggccgttgggtcgcggttgaccgtccgtggctttgtagagttcttgaatctggtgaaccaactgattgttcaactcagctagctgtgcattcttcgaagacaattgctcgaattcctggaagctcttctcccgtcgaatgttcatggcttccacttcctccgacaggtcattgcgcttctgcatgaggtcttcaatttgtggggcaaacgagtctttcagcttttgaatggactcagccagctcgcgcagcacatggttggagagtttgccgaggtccaatggcccactggggccaccacgtttctcagcctccatatgatcagtgaggactgtgagctcacgtagaacaatctcgcgctgagcgtcaaggacaaccatggtagatcgcttttcagaaagctcggtgttaacctgcttgacatctgcggcggtacgagcggctgactcgagttctgcaactcgcagacgttctttgcgcagttcgttgcgaagccaagagatctcttcactctgtgatccagtgatggggctgccaacatctgttccggcgatgcttcgagtggtaggtgatcgagggttcttgagatctttgctgatccgcacactcttctcactgtagcttcgaccatggcggacagagtttgagacgcgccgcagaaacgactcgttgttttgcccaacggtgtcatcgccaccgatgatgcgcgataatccctcgtccataggcaagtcagctccataccgtagcacgggcgatgtgccggcgccatcgtaatggtgcgattcatgcggtgaggtgttcaaggcagtatgctgaatgggctgttcgaaagtatcgctacggagcataggcaagtccccgtactgcgaggatgcaggtgacgatccgacctcttttctcggaatttggtgaagcttgctttcgagtgaatcgccgcgctttggcagatatggcaagccggagggttgagagcgcggcaagtccattgaaccgtggtcgtgacgatgaagctcattcgaggaacgagctccagccgaagtgaagtcatccattggaatgtgtcgctttgtgtcaccggagaattcttttgatctggtgctgtcggggctagtaggcccaggaaggttgctagtctctctgaagctgattggtatgtcggatgagctacgagtgtggcgaccctttgcaggcttggatgaatcggaacttgataatggtgctttatcgggtgaagttgagttgttttcttcccaacctttctcctgataggcaatatggggagaatgattatcggaagatgttcgagaaggaggttcttgtcgatattcacggccgtcgtgggacgcttgattaaagtagtcgcccggaggctcctgccgtgtctgtgagtgaccacgggaggaattaccctcagctgaaggatcaaaggcaagaggaattaacagttcaccgccatctgcatctgcatcggtgttgtgtgaaattgattgacggttgctgcggtatgtgctggagggaagaagaatattatctgtgtgaatggtaagtaagagctcgtgaccgggcgacaagacaccgcgcgagaagggttccagccctgaacgcgcgaggttatattcttatagatcaataatgacaataagtatatgcggtggcaacgatggtgcataaaaggatacaaagcgctgcaaagaccacacacaatgtgaccacatgtgcacgatatgacaataaggtgacaaaggctgcgatgattatacatctagactgcaacaagggtttcttacctgaatcagcctgctgatttgaaattgagcttccgggtccttcatcatttagatcgggcgtttccgccattttactagggtcaggcgtgcctgtatattcgctgttctcctcatcgtttatttgcgattcttcaaggaggtggggaggcaacgagggcaaggatttgtccagcttcacattaggtgctgctggttttttcccactactgccgccggctttccgttttctcctccgtgccattagcgattcgtgacattccatgcagaaaataccctgcgaagtacgcgcatagcgcaagttctcaatttttcgcttgcaatttcggcatcggaagcattgagcacagaaagcctggtctcctgttaagatggccaaatcctcaatcttgttgttgcaggagctacaactgtatgtgcagttactgcatataagtgatccgtcgcccaaaaggaggaggtgcgcatccgaatccagtagagtgttgcatgtactgcatcggaaacagtcgatgtgccatcgatttccagctgccagaggttagcgacatgaagaaaatggacaaaaagaattcccccgcaatatcccacataccaagctcaaatgcttttccttcttcaagggtctgccaggacggttagtcaagctcctgtccgctcactccacccacagtgtgcctacctctccacagcccttgcatgggtaggactcgtcctgctccatagactccggataagcgccctggttctccatcttgagatccaccgtctaccgcgcaaaatgtaaggtcgactatggccgtagatcgatccgaatataagtctggcgggggcgcagacttagtccaacaattatgtgtatccgggcgattcgtgatcgctacagaagatctcactcgcagtcacatgcgccgttggtgctgctggcttgaagatgcttcttgggcgtaacggcgggacgccgatattagggagatagggacgtcggtgcgggtttggagggggagatgcaacaagtgctggaaggacgaatggtggctgaatctgcagactaccgaggagttaaaaacgtgatccaacactaggtttaagcgtaagacaccagtccgcccaatctgtcctgaactaagacaagcaggtcggactaggatgataacggcaatcatttgcctatgaaccaaggatcatgaatatcaatctctcgacataccaggcactgctagccgtgctacagaagtgtttcagataaatgatcgcggatgttgtgatcattaagcgcaacaggcgaagcgaaacggaaattgcccctcgcgggcgttgaattggtttggagattggacagacagaagccccgaggcaaaaggaaatgagatccgggagttaagactataatggaaaagaaaaagaaaagaaaaagcaatgaaacatgagactgggattagggggttggagggatgagaaaggagagactagaaggtgaacttttggctttctgccacagaaaggtccttttccccacgtaacttacaatatcatcatattaagtactctatcctctagcaatctttttcctttcacgcggtatagatctaatattattgtgctctgtaactgcccgacctatccttgtctaaattgtaccttaacccctagtatgtacgctggtacggagtactttgactgaggacgcgcagcccagaacgtgcggagtttcatttccccaatgcaacgaccaatgggcttcttgatacccctgaattttgtatctgatttaatctccgctaaagtgataatgaagagggtactccgtacggtactattgtattctcccaacaatatcaacccaattaaaaagccaccgtctgtgaaagaggcccaagtcagcttctcctgggcagcttcggatctggagcatttcacctctgaggatcgctccatagccccagtgttttgaccacggtacgagtattttgtctcaaacacttctcacacgctatctccggccttcggtccttcattttcagtctctacaccgtagtttcccaaagactccggagcctccatggagagtttaatgatattcccgagaagctcaattacaacctgaagacatccagccttaagggcagtgcctacattacccctgatcctttatattgaagcccaggcctcccgtgctgtttggaggatgtgaaacacttgccgtgtcacgtgagagtcaatgtatatgtacggagcctctattaatagcccggctcatcttttcaaacactttaacatacggagtaaagttgaacgaaattaagtgtcgagaactcccagtatatgtatcaggattgtctcagggtgtgtcaggtctaccgaatgttttgggttgcggtactgtatcatgttctggacccctaaaacaacgcctcgcaaatgaaatacatcataggcaccattattgtaaatattcggtgtgtattccatactccacggtggccaatgatatactgggtccacttgcaattacatatcaatttatcttgtaccccgtgcatacaacatagatctgggaaatgggtatctctacttcgtgcattgaggcataatgaccacccacaaagacagtttacattcctagcatataaagtgtaatactatccaacatgtgttcgtaaaatgaagaataattcccatattaatacacagtaccgtttatcaagtacaatatgtagttgggcacgtaccactggcggatcggcaggagtggagtttatacgcagccatgacatcttctcttcttattttgtacgcttcttcgaccgtacaaatccagatgttaattcacatgcctgactggcaaaaacaagatcaacgtattcaaacgtgcaagtatgggctcttaaaagtcccagccaccgatgatccacaaccatttaatgatgggtctgcaatgaaatccgttattgaaagggtgacagggctctccaagtggcactggtaggatatagtatgatatgcgcagctgcccgataagaggacccgtgcctggcgtaaggctgagaatccacattcagacgatcagactacaatgtctgggcataaacaataaaggcccacacccccgttctgtaaattttataattcgtctcttgtcgatcaaagtcgggttcatttcaattggatcaaacgctgacacttggattacgttggtatattctaggtcagttggtgcattagacgtgcgaagatcctgcagtccttcatgcggcaattgcaatgagtgcgcgtcatcaacttgaagaggttcaaacggaataaatcgagaatcgagaaagtatgcttccaaggcgataatgcccatgaaaagagtcttaacggtaaatctttggaacaggatacatttttttgacatgtaaggaaccacttagggaaatgctaccagatgcgatacagaaaggatcgcatgttttcgtatgagtagggaatcatacactcgaggattccaaccactcggagacgtagatcatgtgaccacaatgaggcttgaaggacccccactttagaaaattacgaatcagcgttgcccctcgaacctcacttcttctttcatctctgactttttatcgtctcaccttaatacgaacgaatttaaaatgggtgtcgagagaaagattattactcgtggcaacggcactgactcgcctgcttcgggtgacaaggtcgctatccactactcgggatggctctacgacgctaagaagtccaacaagggcttccagggcaagcagtaagctgactgccatacctagagtcatttaggttatgaattgagtattttgtatactaattattcatcccaatagattcgatagctccagaacccccggccgtggccctttgactgttcagattggtgttggacaggtcatcaagggtatcatatcctcttttttctctctctcaatagaatcattcagactttcaattatttaacttcttcacattccaaattggatgctaacactacctctctgtctgattaggttgggatgagggtgttttgcagatgaccctaggagagaaggcaaccctgatcatttccccgtgagtaaattccacatcgaacaagagaatatcggactaccactaacatatttctcagggactatggctacggtgacaagtatgtgaacacactcgacatactgacatccgttagctgaaaatgttaacatttcgtttctacacagggcagctggcaagattcccgcaggctcgactcttatcttgtaagttcgtgcaagtggataatgctatcgggaaactaactatgttacagcgaggttgagctccttaagatcaacaacaagagcgcctaaataagcaattgaattgagcagacaagcatggcattgtcagctattcactgcgatactgctcacatcatacagtacaagttaatcctcatctgggttgcgtttcattgtacagagtagagtgttggtaggtaaagcacactggttaggtaatagagctcgatgaagcctggaaagcgccctctctgtccatcgagtacaggtatgtggaacaataaagatcattaaaagtcgctaaaagatgtatgtacatatgccatatatacagaacgaaaaagcagagtgaaggccgacctagagacggtgttgaacaggtgactgaggcgccggagttgggaccgagtttttctcagcaggctcttcccagcgcaagatacgagccattttgttatatgagtcgataccgcggcgagcgtggtccgcaggaacaaatggatcggtctctccgagagttcggctaaagagttcaagagaaacccagccgcggaagccgagatcttcgaagaagacacgagcgatatccacaatgggcagataaccaccacgcgattcctcaaggggaaatagacgagcgttacgggaccaattcatgcgggcaggctgtccagcgacatagaaaggatgcttctcatccaacggggcggaaagacgctcaccgtcaacaagctggacatagaagatcttggccgggtcaatattggcaatgcgcaggcgctgcaatgaggcagccaagtccgcagccgcattgggggtgcgacccgaaggactagcagggtctgcatatacacgaccggcgatattgaaggagtcaagacagagaccaaagttgcgacgattgacatcacggaccacctcccacgaggcctcccaggtatcaatgtgatccccccaacagagagcctcgtagacaaagcggaaaccagccccggcgcccaaatctgctaagcgctggagatcacgaacaatgactgtgcggtcgccagtggtgcgggcagcaccggtcttcgggtctggacctaggaagtttgacggaatctggatcatgtctgtgcctagcgcccgcgccagtgtgaaccatttgggaagtttctcattgataagccgatctgactccgcgcggtcgatgaggccctcgtacatggaaaatggctgcaggcagataatggtcagccctaggcgcttacacatcaaccgtgttgaccgcgcggcttcgtggtgatcaccgctaaatacccgctgcgcgtagcagtctagatcgtcgaagaagagttcaatgccctcgaagccgtgggctgcggcttgcatcagcttgccgggtaggtcgtgtacccagggccgacctaaggacattgaggcgatagcgggacgattgaaagccatttggaagttatgaatgggtacttcttttctatgtcgatattataaattcaaaaggtgggttcgtgtcagtctttcttctctttttaggaaagtttgcaagcggagatattaagggagcgaggatttctcaacaatattaggtgttttctaggtatcaaaagggaagatactaaaatgattgcgacaaaacgttatcccctacggtgctttctatgattgaacgtttttcctggtctgctgtgattcgtgtcttgatgacgaggccgaacctgatagagggtcatatgtctgggtaaacgctgacccgctttcgttttcccaccaattccaccacgcctggagtgcactgttccacccaccacgcggaattttgcttccccattaaacatgcttcctgcccacctgtccttagaaggaaaatacccgtagatacccggcaaggtttttaccgtgctggtcggaatgtaaccggagaaccggtgccgaatggtcatgctactcggagtccggcgcaataataatacactttctgcttcagctctacgggttacaacgggtttgaatttgttcaattctttcagaaccgaaatctgcttttcatcccaatcatcgccatgtccgtcaaggttgccattatcggcgcaggccttattggccctcgtcatgcgcaatccgtaatctcaaacccctcaacagagctaattgcgctcgttgacccaatgccggctggcgaagcaaccgcatccagtcttaaaaccaactactacccttctgtggcctcactacttgcatccccccaccgtcccgacgcagcaatcgtctgcacaccaaaccacacccacgtccccgtcgcaaaggagctccttgcaggtggtatccacgttctccttgaaaagcccgtaagcgatacgctggaaactggccgctccctactagagtttgcccaagccccagagcgcgcccacctcaagctcctagtcggccaccaccgccgcttcaatccttacgtgcgagctacgaaggccgccctagatgctggatctctcggccgccccattgctatcaacggtctgtggaccttgttcaagccagatccatatttcgccccgccaacagactggcgtgcatcgaatgagcgcggaggtggtgtcatccccatcaaccttgtccacgacatcgacctcatgcaccactttttcgggcctatcgtgcgcgtgacagcagagcgcacgctgccacagcgcccaagcccaccacacaatgctgatgaaggtgctgccctgacgctgcgcttcgcatcgggtgttgtcggcacgtttctggtctgcgatgcgacgccgtcgccgcataatttcgagactggtacgggcgagaacccgctcatcccacggacgacgactggcggtgactctgatttctatcgaatctttggctcggatgcttcgctcagtgtgcccgacctgacccgctggagttatgatgctagccctgagaagagctggaattcaccattgactgttgagcggattccgcttccagatgataaggcgccttttgacctgcagcttgcgcattttgtcgatgtcatcaatggagatgcggcgcctagctgtactggtgaggaaggtttgcgtgcattgattgtttgtgaggctgttcagaaggctatgtggtcgggtcagcctgtggatattgatgttaacttgttggcaaaatcggatgactagttagctacagactgatgtgagtgtgagtttactgatctgtgaggtgcgtgtgtctgtttgatcttcttacaatatgtccaaaagggggatgacaagacactaaggggtatattcattaggtcatttgcttcttttaaaccagcacatcctattacacgcagaccacatgatgtgcaatcctaaataattgcgagcgcggtttggcacctcgtccgacaacaaaatcacaacgcggcaaaagacaccaacacggaaatgattcaccaccgcatcgttcaagcgtactttggctgagccgaagtatcctcgacttgctcagtgcgcatctttccagtatcaatgccagcagcctcgacatcgtttcggaaaagctcttcattctcacgcagctgggcgaccatcttcccatgggcatgccgcacgggcttgatgtcaaacagctgttccatgctctcaagaggaatacccttggtttcagggacgaggaaatacacgaagacaatggagagcatcattaatgatgcgaagaagaagtatacgccgtatcccatggctgtgaacatctgcggagtgaatcgcgagacgaggaagttccagagccagttggaggcggcggcgcaggcctgtgccatggaacgcatgttaggatcgaacatttcctgcagatgctgttagcaatatgtcttaacgcttgtggattgattaagtactggaacaatgttcaaatactaatgtgcggatgcttaccgagttgaggacccacggggtaccgttccaggttggggtatagaagaccgtccacaggtagaagaaaaacatggctgcgataccaccgctgctcaaggactcgcttggattattttggggttgggcaaccttgatgtacgcgccgacaatccacaaacatacggaaccacctgctgcgccaaccaacagcaggttacggcgaccgacgtgatcaatcaaccaaagcagccaaatgaaagtcactatggtcttgactacaccgaaaattccagtggtgaacagactggtgttggtacccctgacaccaatctaaaagcattattagcgtcagtcatgaatgctcacatggatcgcaacaagattgcgacttaccgatttgaagacagtcggactgtaataattgatggcattgataccagatccattctgccagaagaacagcgcgcttccgaggaatagacgccacatgactttcttgttggtcccagccgccttgaaaggtttccagaaaccaatgccaatattacggcgctgctcatccagggcttggtcaatagcaccgatctcctcaatcatatagatatcgtgctcgggcaattggcgtatccagcaaagatttttgatagcctgctcgcggcgaccgcgtccgaagagccaacgaggcgattcccggatgaagtaggcaccgatgatcaagagaccagaaggaatcaactgaatagcaaaaggaatgatccattgcttgtggctaggtgccatggtctcgtcaataccgaactattgatattgtcttagtatccacaaaacaacccggacacaaacgaaaaggaaaactcacattgatccaaaatcctacaagaccgccgatctgccagccaagctcatacacaccaaccaacctaccacgaatagccggaggagccaattcggagatgtagattggggtgatgttagatcccgctccgacaccaataccagcgagaactcggccaccgtaaaggagaccaagtcctcgttgaccattagcaccaagcatgataccagcaccgagagtgaaaaccaagccagaggccaacaggccaaccctacgaccccagaagtgaccaatgggatacacgaacaaagcaccgaagaaggcaccagcctggtagcaggatacgatgttggcgctgatcaggttcttggtagtagtagacatgtcgtcgaagtggaactcactcttgaaggagtcaagagagagcgtagtgccgatgaaagcactgtcgtagccaatcatacaggatgtgcatgatgccactgctgccagaagatagattctccagttataaaccacgctaggcgtcggccggtcctcgaccagcttcaggatagacatggcagcgattcaatatagaagaattgaagaggaaatgcaagagcctctgtgaccagacgacctcgatccccaatgctagatgcagagaggcagtaggatgtatcaagagatgtatgagatgcaggtgcaagcgcaaggggagagaagaggaaaccaaaaagaaagcctacaccacgttttctcgcgagggtgggcaagatataaataggaattgccccggactgtcgattcgcccttggaaaaagagaggacagaatctggggtttggaaagggggagaaatcgtggggatgcggagtcggagaaaggtataggacaggttctcgaaatccgaaaaatgaagaaaaccaaggcgcggcaaaacgaatactctaagttcttctgtgcgtgaggacagttgcctttgttgcctcttggcacctacaatgtggcttgctaccaagaagaaattgactcagagggacatgcaaactctgccgggctgccacgaagtctacaaaccgagatcattcgcttaagacgttggattgtggagatccgatgccgctgggagaagtggggacttccccggcgggtttccagtaacccgcgacagcgtgcatggtcagctcgatctttctggggtaccccggaggcaatgcagtggacgatctagccctggtgtgaaatagcgaatggttattggtctgataagatgaacggaaatggacccatgactaggggagggagaaaacggccaatgaccgattgctagacatgggtggcggggaaaagcctttccccggaagcttaaggcgaggcgcggccactgtgaagtaatccattggcgactgtctgccggagcaattatcagttttcaagtcatcactcgtattacccgcgttattttcattggctcctgtaaagttccctttatcgtggggtagaggtggttgttggtggctgtagtagtgggaaatcattcagcccggcagatgttctgtcaacaatgaagcatcgacttttcatctcatgaaagaggttatatagaccaacaagcaatcatttctcctcatatgtagaatatgataaaatgatatttctcgagggaagtgggataggtgaaagagtagaatatttcgttgtttctccgacggcttatcgctttctcgcagattccacgacgcctatttgataggtcatgtgatagttgtatcaatgtgatcgtacgtaccagagtagctattgaagagggtatacgatgggcagtctggcctagcagataagacaagggcgacgcaacaacactaaccatccaaggaggtcagctagcaagcatagggaccatacagaccacagtaattccctctatcttagtggagcaacatcatataaaacccttttcattctatgggatcctatacgctaagttctatctgacaccctgtctgaaaatatagcaactatctggggtttccccactgtacgggatcatcatgtatctgtcccatctttcaggcagaaagaagtcaatgccaaaagaccgggtcacgtgatacgcacgaggcttatgatttaattgcttcgcttcgctccgcaattagtacagatcaggtaataagtgatctctgaatacattcgttgtggcttcatagtgggaaatggctcggttcaatcttcccccgaactgaaatgtaggaaagccgccccacccggcagaggaaatatccatggtacgtatacggaacagtgactagtgaggctaaggattttccgtctgaatttcgaatttcgtcttataatattgtaggctcccttctgcatatctcagaaggtaaatatacacaatcatcatgtccgtcacagaaatcaaccaaacgcagctagaagagcccatcgccattccctctaaccgcgatggcgtcgcctacctgtacggtcaccctcttctgaactcgctctccccgcctctccaccagacagtctacaacgcgctcggtctcaactggactcaaatccccttatctagtgtgtctggatcatcagagacataccctcccccatacacacggtcgccgccgattgagaaatatctggcatcgatcaagtcgaatccgaagtttgtcggttcgtccgtgacaatgcctcacaaggtcgcaatcatgccatatctcgacgacctcaccgaacacgcccgccaagctggcgcctgcaacaccatcttcctacgcgaggacccaacaactggtcagcgtcaatacgtcggcaccaacaccgactgcgacggcatccgggaggcccttacacagaatgcacctgacccaacacgcttccgcggccggcccgcgctcatcatcggtggcggcggcactgcccgcactgctatctacgttatgcgccgctggctcggctccagtcgtatctacatcgtcaaccgcgacgccgccgaggtcgccgccatcctcgaggaagaccgtcgccgcaaccctgaccccaatgctcaggctcctcttatccccgtcactgaccccgccgaggctgcccgcctggaatcccccgcggctatcgtatccggtatccctaactatcccccgaaatctcctgaggagctgcgttctcgcgctatcattcaggctttcttgggtactgctgcaggtgcggagaagcagcagggtgtcatcctggagatgtgctaccaccccacgccctggactgagatagctcacctggcttctgttggtgggtggaaggtcatcctaggctctgaggctttgatttggcagggtctcgagcaggcgcgtctttggactggaaaggatgtcatcgggacccctggcctcgtgcaggaggttaaggatcttgtttccaagaccattgcggaacgtggatctgcgaaatctaccctgtgatttcttttatacaatcacgtttcgtttttttttttttttttttttttttttttttttaaagccccaaaacccctggcctcgtgcaggaggttaaggatcttgtttccaagaccattgcggaacgtggatctgcgaaatctaccctgtgatttcttttatacaatcacgtttcgttttttttttttttttttgatcattgtatagagcccaaaatagctgctagttgcattgtgtatatataatagatggtgtcctcattttgtaatacatctcaatatgtatatctgtacgtctcatcagacctatacacaataaaacaagatcaaaaggctaagccattcaagctccgggtcgtgagtattccagattacggactcggcgccagacttcgcgtactgtccgctcctgtgtttcgcggcctgactcggttgcagatgggccagcgggtctgaaatgtcattagcaagatccaacactagaagggaaatcattcaaagacgcacctaattgctaaatacaacctgctgccaagtcggacatcttcgattggcgccgtatccacattctctgggggattagcagtagtcataagtccaccggcctccagaagaatagcagcaccagcagcgatatccctgtaatagtcagcctcagcatacctatcttcgactctccaagagatagaagtagaaaaagagaaaagaaaagcaaaactcaccactcccaacaacctccctcccaccaaatatcaaaagaacccattgcaacatacgcaagatcaagcgtcgcactgcccaaactgcgtacaccatgcaccataccacctctcccattccgactacccacctccgcagccatattaacaaaactctcaatcttgcgatgcatatttccatcaggaatatcgcggcggtctttaccccactcgcaagaaaagatacactgtgaaggcgcattggcaggcattggcggggtcgggttgtggatgagcggaagacggcgagtctcgtttagccaggctccgcgcccgctgcaggaggaccagagctggtctgtgaatggggcatatattacaccaattactggcttgtgttgcacgatgaagccgatcgagacacaaaacatggggaaaatatgtgtgtagtttacggttcctataaggtgggttcattagttaagtgtcggtttagaacaatgagcagtcggtcatggcttcagggtcctgatttttaccatctaatgggtcgatgcaccatgttggttgctcgtcaatgaggtagtcgcgcgactggcctttggcataggcctcctcgccgaggaatctaggggtctgttagtcttgttgccagcagattttggtaatgatactaacttgtgagaggggtatcttgcctcgagggtgcttcggatgaatacttcgacgtctgccaggtaacactgtgagcgagtctgatatgccttatcggctatgccgccttaccttcgtcggtttgtgtcacaatatctactgcgttttccttttcctcaaaggcgtaagaggagccatttgcgcctgaaatacgctggtcaacacgctccatgagcatcttgcctgccttgcggcccaggtctactgcgaaagcgtatatctcatccagctcatctcgggaaaagggtccgacggccatggtgaaacagattaatggggatgtgtggaagcaacgtctcaaaatatgttcagaagcaaggtcgaagggaaaagcctagcttcttgagtcatccggtgaaaattggtgtgtccaaaacaaccgtcactaaccgacgtcgggaattgcttatcgagacgtttccccactttatggggaaatttatagcttcccttggcgatattactaaaactcgtagttctatgcattgctgcttcacttgactcgctactaattttctctcttctaagaatggtatgaaaacaacggattttgcctccccagtcaagcggaagtcatcattttccatgatgttatatgcatgcaagtccctgtatactgatcaaaccgaacagcataccctggaatcatagaccgcatgatgagatagtcgatagcattaccccatttagcggttccattcaaggttcgccggatacctcgatctaggctttctgtgagccagtccgagtataggcatggttgcactatagtaaggtcaggaggagcccgtgcagtccacatttggagcagaaaatcagtcatgtcatttagaaatgcttcgcgttggatctgaggaatatggagatttcagatagtcagtggcgtaccattgaccctttccgaatatatgaccgggtgttttgggctgagaaaaaggcttggtgctttgattgatgtacattgttctttcaaacatcagaaagttttcactgcacgtagttcgtttttccaattattggaatcgtgaccgactcgagcagccctctctacagtatcctcaaaggcaattttgaatggtctgtaggagccgccatggcggggtgttttatcgccaaaggaggagggaacccctaggcggagttggctggcctccgagagaagatctggcaagttcaccatgctgaggcttttaagtggtctggagctgatgtgaagcggggggtacgggggataaatggagagagaaccggtgagtgtcacagcgccaaggctgtttgcttgtgacgcaacggccaatagatcaggacattgatccccttactgtgtagcaacgtgcgtgggctgatcctagtttttgtattttatattatatttgcgttgaaggatgtgtttccagttgacaaatataatgggtataatatatttcgtgtggcttgtcgtcttaaaaacaacggcatctgcggcatacagttgggaattccactgatttgatacatgaaaagaatgtgaatacgcatatcttctggcgtgggtgtgccgccgactttcctttgactcattattatgctgagtctgaagatttaagaatactcttgcatctaacattgattggatcagaagcaagccaacgaagtttgtattgtctgcggcaatgtgtcatcagatacagacggggaaggaatatcccaagtttccttgtatctgaattcgtcatggcacagattgggcagttcaccactagctgcggttgatcatcattcatagaaatagctggccatattcaagtcggctgtccatccatttgctgtaacctgtctcgtatcgcttcatgatcattattcccttcatcgtctttgtactcttgaagcacaatgctccgcataacgcgcctaggagcgcggcggccagtgaacagttcaaactgagcgaagccttgttctggcagaacatcaaggccatccagggctacccaaccgcgatgggatagggctcgtgtttgtttcatgagaggggtattgaggggcttgtatgcgagctaaaatcattggttaggaataaaacaccattattttgggttggtacaagagtaaaaaggaaacttacgtcaacaacaacgccacctgtcgggctctctagccattgtgctggcatatggaaattaggtgctagctcgccgccaatgctatgagccggaattcctgagacaacgatcgtcggctgtttgaaatcggcaggccaggggtcggataatgaagcaataatgcgaactgtgggacggccagacccgctggcttcttttgagtgtagatcttgccggttgtagtggtgggccagtctttccgcattggcgatcgtacggttgtagacaaagatattttgcacaccaagatggatcatggagtaaattgcagcacgggccattccaccagatccgatgacaagacctgtcgatgatgagcgtatcgcatttgccggagacagaccgcggcgaatgcaattgcagataccaatccaatcggtgttatcaccgtgaagtcccttgatagggccggcacggctcttttggagaaagactgaagattcttgaagacggttgtcgtccaggtcatcaaggttgcggatggggatgagggtattgacggcaccgatagctcgtgcatgcgcagacattgagtggaggagagggatacactctgttttgtatggaagactgacactcgatcctccgaagtattgattttccacaagttcatttaatccccgtagagtaggtgattggtgaatggagtaattgtgcggcaaaccgcagattttgaaagccgtgttgtgcatcgcgggcgacatactgtatgtggtgttggcgccaaagacgaagaattgcatcgggtccaaggcaaatgagctatagagcgccttctgcacttcgcgggctgtgatatacgatcgtaggtgagttggaagttccgttaccaaggacggatgtgtgactggggagagaataggattgaagcaacgagacatgcggccaagaggaccggtgttataggcgatcagcgaaatgccagcaactggcaggctttggatgcgatggcgaaatctttgcaccgcgaggttgtcttcgggtgtctcagccggttggcatagtcggactatgtcgcatcctaggcttttagcccgctcataaacttccatatactcatcgccatcccaacccccgggcagaggatggaaggcttcgaagtggccaatgatcctggttcgtccacttgaggagatgatctgggaaatgatattgtcatcccgggtgaggtcaactgtgaggaaaccggtggagagtcgcaagccatggcggacgaggtttaggtacgtttcatcggtacatctcaagggaacttgattgggagacagagatcctgtaggggtggtatagctttccacatgatatatcaacggcacaatgatgttgcgacggattgttgctaccgcctgactaatactgtccgcaagacttgagctgaggcctggctgaccagaagagtctgttacatcgactgccagttcgaaggcatcggcggtgaattccagctgctcaatatccatgcccttctcacaaatcttagaaaatggcactgacactgcagatgtgtacatacgagattccacaggcaacagcgacagcgggaaagatgcatgctggctgttaagttctgcaatgtccccggttatgaaggcgatgaaccggagaaagtcccgctgaactcgtttcaatgttaaaaacggaatgggagtatgtgacctaggttctgttcgatacgtcggtgatgcaacatcgctatcacttctggcctctgacagattgaaaaattcgagattcgagcaccctcggtatatcggtccggacaattctaggaaatgtcgcaccttttgcgtatcccacgctttgagatatgactggatgctctctgcatctctaacaacgtggataacaggatgcgtctgcgcatattccctaagaagtcgttggccattgcgttccatcgacccggccccgcacgcaatcacacacccatcctggttgtctgctagcatcgactcaaagacccgggcctcttgtagtcggtaaacagatccatcattttccttcttaaactcagcacgggaacatcccacagtctgatgaaaatagcggtctgcatcaatcaatcgtcgaccggatgtcgccgcgagaatgaccgccagacttgactttcccgtgccacggattccgatcaacacgacagatgccttcggactgaaggtccgtggggtctgaagatggccctgttcaaacagtattggagatccgcggttggagttcaattctttgagcgacggtggatgcgaatatccggatgcttgtgtgcgttcactcgatggacgtgaaggtggttgagatgaggggagaatagtgtgagggggcacgacgcctgggctatactttcgaggcccatcatctaaagtctcgacttcgtggagctttcgtttcggtgggcgtaccaacatggacatggcgcatagagtgttccacgtgcggcaatgaaatcaggagcaggctagttgaggacccattaccacagagggaaaggtgggggccacggtagggtattgagatatgtgtatagaggatccggagatgtggagggaacgaaccaatatggtaagcgggattttccaaggtttgcgggggaaaaggatattcgtgaaaaaggcgtgggtctgggtgcccccgggccatacgctaccgttacataaggcggacgagcactcacccggccatcccatatcagattttgcctgcagtatgattcgtaatataggtattttatacatttgaatacatagagttatacatcgaaaagtccttcatgtctgaattctctactccgtacattgattctcaatgaatataactctttctccatctagctattcactagataagtttccggtttataatgaaaatatagagtactaattgtctaggtaatttgacggtaatgaggcagtaatgaaaagctggcggtgagtcaggcggtcaatatctactagtataggaaaatctgatatggcggttaaagattgccgtaacccggggactttcgattttcctcttccccgcgggggacttgcgctcagatacgaacatgcgaaacaactggggaaatcatcgaaatttctgaagtttggtctgaattgcgcccctagcttacccaaaaaatcagcttcaaattcatagcttaaagctcagtctgcacgcgattaccttttgcgagacagtgactggctcaccggtagccgggtatcgacccttccccggaagaaccttgttagcaagcgtcttgttttgtgctgcacctaacctcaacatcgcgcttcccccaacagccctgatatatttccagtgcagctcattttcatggcgtaatcgcctgatcgtccgtgcaggcgcctgtcggcaaaggattcgtcacatatcacttggggggaacatgcacccgaatcctccaagtggatcgcaaaatcaactaccatgagcgccgaacagcggcaagctaccggctctagcagcaagtccaaacgacgatggcccgagccagaagatgacgggaaggcgacaggggaaccgaaacgtcagcgtgtttcacgggcttgcgatagctgccggtcgaaaaaggacaaatgcgacggaaaacagccagtttgctcgacttgcgcatcgctctgccgaccgtgtacttataaagccaacccaaagaagcgaggcctgcccactggctacattcgctcgctggagttactttgggggctggtattccaaaggatccaaggcagtgaagatgtcatgcgagctttgatgcgatcaatcaatcttccaagtcacttggccacgatgggcaaggaaacggaggggtccgatgcattgctagcttccttcaaaaacagcacagtactcagagatattgagcgcattcttatagcactagaacagccggaggaggaaagagagcgaaatatccagggatgtggcgatggagagacacctctcgatgtcgacggaattctttcgtccgccgaagcacaggaatggcagatcccagaaggcatggaagctcgcgagacgccattaccagggatatcgccgactcgaaccgcaggaggcatcgctcctacgaaagtcaccggaccacgcccgactacagactgtggtattcagacaagtgcaccagattaccgaccctcgtcctctttcatctcctcgccgaatcctcattaccctcgatcgctctccatgaaaacccctcttcaactcccctataacgcatggccactttttgatgtatatttctcctacacgcagtgttggttccccatactcgaaaagcatgacatacttcgtaccgcttttcaatataccgaaggcgatgtatacgcatcgtgtttaacccccgggtctggggaacacgcggccttatgggctgttctcgctctcgcctcgctccaggatgcttctatctcagcttccggtgaagctgaagagcaccctactgatcatatgactccatcacgaatgtataagactgcccggcaattgattccgcctgaaagtggccctcacgaaatcggacatgtgcaagcactgttgatcctgggtctggtcaagtttggacagcaagaatggactgggtcatggatgcttgtcggtcaggctgttcggattgcgcatatactaggtcttgatcaaccttcgttttctccatcatcgaggactccggatcaagaaaaacagcttggtcgagcaaaacatgtgtttttgggttgctttgttctcgagactctcattgcggaatcaatttcacaaagcccatcgctgcgaaaggcagacctagccagggtaggcgctatcaatgaagatggtcttgaggaatggcatccttgggaggatcaaactgggttacggcccacccaatcatcacgggcatctatgcagcgtggtccccttcacgcgttgagtactttcaaccgcctcgtcggcctcgtatccattttgaatgatctatgctgttgcaagcacgacccaacgatatctcgatcacagctggagcaactggagttgcaattacagcgatgggtaacagaattaccaaagagttatcgtgtcgatctacaaagtcgccctgtgagactggcttctccacatatttttgggttagagatgacatatgaaagtgttgtcattgctctcagctctcaaattgccattcgtgaatatgatcagaacatacccgaaccccctcacaaaattcgtgctacggaaagctcgaaaaaacttttgcaattgcttcaggcatatgtggagacatatagcttttcagccacagcaccaacctttggtttgatgcttcgatttggccttccacggtccatctctagggatctcccatcagttcttgacatggggttacgaaccaacatatacaatctctcttcgcagctttctgtattgtggactatgccagaccagcaaaccgctagtcaaggtatatcacaaagatctcaacacctaggtacttctcctgcggtctcacagcatattggtgcctctaccggcggagatttagaaatcccgttatcgctctcaatggccacaccttcacatcatcttcgtgcaacacatgcgtctcaaaataatgctcatgccgcggctgcccctgagaacccattcctccccacgccttggctcagagccacacaacacatcgaagatgtatctctcctccgcacaccgtcctctctaacctccgtcgggggcgcctctgaacttcccccacaacagagccacttggatgattctcttaacattgggctttctcatcctacatcagcgcctagccaatcccacagtaccgggatgctcgccgagatttcgccatcgtatcaccagaccgcacactaccacccaacggcatatcacgactcatccgtcaatatgagcacatttgttgatatggatggctatgcgcgtccacggaggcagcggattgctcctgatctcgatgcattatttgacgagctggcgtcattagatggtgcagaaaagtatgcatttatcccctatttctttggcataatcactgactttaaccctctgtagagccgacaatcaaccagagttcatgcagaacctaggttttgtttctaatgcgggcattcctgagctctactcgttctccagtcagatcgagcctttcttactggcagagacccagcagctacccaacaatggcaatacctctagtatacgacaagaagcgcagcttcttaatatgtcgggaacccccaagcgatgacgtgatgtggaatcactccattctaatgatctggatgccgtgggaacaccctgtcgccgctggtcggcctcgttggcctctgagtctgctattcatatgggactctggactagagctatacatctagttgttggctcgcatattatatcacacattcgaagcctcaaaggggagtctcaatttgtgtctgtgtgtgttgtgtaatgcgcggcgcatctctacaatatacaaagctattccaggctaggcaactggtaataaaagatatcctctatgacacatatgaaatcactagtctacaaattcatttctcggaaggatgagcgcctttacaagaggacttctacatgaatccataaaagtttcccacaaaaaaaaaagagtatatacagtcacatatcccaactcaatcatagcgcagccttagcctccttttccttctcctcgaaattagcacaaacatgctcaactgcaaccttatacccgtataccccaagaccaacaataatgcccgcagccttatcactgaagtacgaatgatgtctccagggctcgcgcgcatggacattgctcacatggagctcaataaaagggatactgacaccgagcaaggcatcgcggatcgcaacggaggtatgcgtgtatgcgcctgggttgatgatgataccgtcgaccttgccacgcgccgcctgaatgcggtccacgatagcgccttcgtggttcgactggaagctttcgagaacagcaccatggctggcggcgacctcgcgactgtttgactctatgtcggagagcgttgtgtgtccgtaaatgtgtggctcgcgtgtacccaggaggttcaggttagggccgttgattaggaggatggatttacccattttgagtggtttgatatccgaattgagggattcgatggtatttgggggattgtgaaattgagagactggatatttcaagggttataagattgaaggtaagcaggttatcggatatattcatgttatactcgtctctccgcattttgcccggcccggcagagcgctttgccgtggatgattttttggggtcaactaaatctttcaaatgtctaaaattaatacagaacttttactaggactattagggtaaaattcaattaattctttatctgactagagggaacctggaagtcgctgagagaacagcagtagaggggacaacaaaccggagattgagagaaggcatgataccggtttgtataacttatgtttgcttccacatgtttaagagggagatgcacgatgggtagtatggcatagcaaacaagacgagagcaacctataacaccacctaccaagtaggccagctagcaagcatgggactaaaaaacatcctttaattcagttcttgtgcgccgtcgagtctccctaacatgacaaaccagggcaacatgatggtccgagttcccttactagttacaataactaggaaattgtaattattatttacactatcataggctgagaccgagctcatcttcaagacacgtatggagtgagaaacttcgtgctcacagcatccggaagactatatgtaggcacaactttcaagaccagtgaactgcctttgacgtaattttattcaaaaaataggaaaacctagggaaagacagaaattacggtaaaaaagaaactatattaacctggaaacaccccagctatgacgttgttgaaagacaacacacaagaccacgagggaaaatggtcaccacaatgcaaaaaaagagaaaccaccatctatatcaacagttaccaagacttttgctccgatcctgtactgcaatcggaagttgagtgttcctcttttatctatctctctattttctcttgggttggacctcttggcccaacctcgtctgtggtcgtccaggaccacaactttgattatttttcatcggttagattcggtttcgacgtaggctgactccggggatattgttgaatttctggagtgccatgttgagtgtttcttgcaattgcaagaatgaggtaaaggggtaggtgggattgtgtcaggatcatgaaaaaatcatggcgctgacagtgttcgggaatgaagcgccgaaaaatgccgtttcatgaggggattggaatccaaacggggggactgcgaatggctttacgcctccgacgcccagcgggactcgcgcagcggcatctcctcgccagcttgcttgcggcttccgtctacctcgcgcttccacgcgtagtactcgccgagacgggtctcagcgtagctggcgtaatcgaaatcgatttgggagatttgcgcttggatgagtgcccaaacacccctaggagatatgattagcatgatatcaccattatgctgatctttcaattttgttcgctgaactcaccagtaaagaccgggaatgccacggaagcggtcaacatcctcgtacagccggtcgacaatctcagcctgggacgaagcgtcaagaccgcgttgttcacagtagctcttcgtgtactcagtaaggaactgacggcgcacagactttgtcggcatcatgttgtaatcgcagtcgtagccaccccactcagcaaggtggttcgatatatcgaaggccgcgggtgcaggaaccgcatattcataatcgatgaaattgacaggcgcgacaccgtcttcgggggttgggacaccgttctcgcttggaaggacaatgacgttggcgcagaggagatcgcagtgcgagaagacgagctataaacccagcgattagccatttattcaacaaagcaatccccgttaccagcaaattcaggctaggagccacataccccatcttcaccaatccccttcccgtcgtccagcatatccaaaacccactgcagctcggcttgcaggctcaaccggcgagcacgctgctcgggtgtggtcactggcaaagccagcacccacttttgcagcacagcccacatagatgggcccgcgcgtcggggcttgattacagtgatctcatcgtcctgggagttcgcaatctcagccacgggagcgtccttgtcaggcacggctgcgctactaggaaggacggcgtgccactgcgccaagcggcgagcgacaccgcgccagatgggcggggaaactagatcttggtggttgcagggtctgccgcgaatgaagcggtagagcaggccgtttttgaatcgagcgaggaggggcggggccaggccacggttggccaagagtgcgtgggacttggtttctcctaagaataattgatctacttcagcatatgtcgcaatgggcaagagaggcgcggaggggctttgttttgttggagaagtgggaatcttgacgaagattgtccgtcggggggattttgctcgtactttcgcgatctatgaggatctctgtgccatttccgtacgccctcatcagtactgcctcattgtctatttgttcctccgtcaggccgggtttcaggttgataattttcaagagctaggggctgttagtctcggtttaattccgaaaagcttattgctggtctcatgggaagcaatactgggaaagagggacacacggtgttggtgatgccgtcggtgaaccgcacgaactcaatgttgttgtcaggaccctcccagtcggggttgagggtcagaattagcctgagagcagatgcctgggagtcctcatgactgtatgataggggaatgtatcggaattctggcaagggcgcctgagtgtatgtcgagcccatgttggggttgggtggagcggaggtagaaaaggggtattggcgcaagtcggtttgtgtgccaggaagattttgtgctatttgattagttcacaactgcttgacaggcacccctatatcagtgacgaggtcctcgaattcaagatttaggtaattgcacgaggccaggctgctagcgcagggtgcgaatggcgataaattctagaacgaagtaaagcacaatgtggaaaggcggattctgtattatggcgaaggtacaaaagattcaggggcgaagaatttgaagacgctatcgatggcggggaggtcaatgaaacaacgaggggaggtctcgtgctcccgacccgtgattggaagatgggacgattttctggggcctagggtacattcttgagggcaaaagggacttgtccgccgccactataactggtagtatatggatgtaataagttgtggttctttgaagatataagcctattggatacctataaaatgatttcttcatctcatgctatttgtttcaaccgcaattgcatggcgaagtcgtactaaaacatcttgattgcgcgaagtatgtacgatgtacattgctttcggcaggtccaagtcacggggcaatcacatgaaagacagccttgaagacaaaaagagggtctatggtcacatgcacgggccaagccctgagcttagccctacttacctaatccaacaaaatccctcaacaaaaaaagcgaaattagtcataaaatccagtattagtcaacgaaatggaaaaacccttccaccgaagcccaatccgctctagcgtatattgacttccagacacataaataggacctcctcgcccgcccctttactctttttttcttttctctccatcatcagtagaggtttacataacttaatgtaaatttcaacggggctccacaatgtggcttgctgagggttatcctatggtttcggccatcatgggttttcttccgttcccggccctggagagtaaaggcgtctctctttttcccaatcactttatggctatgctagggtatccttcgggaagccccatgggtgctagctgtggagagggcgtcacataccattttttcagtcactttgatgtgttctggaggttttgcttgctctgatcttcgaatttgatcagaggttgcagcgagcgtagtagcgttggatactgcgattttcagctggctcggtacacggtttaaatgttgtaaaaattatctacaactcatcctacaaagagcatcagaaacttccctaggctttatgatctcttgcgatgctgtatctcgccaagacgagaccataatgttctggtctttcttgccaagagatatcgttgatgtcggcatgccgaggccttaaggtatatgacccaaactaagtcactatatgtactactcttcaccgctgaagccgaaatcttcattgtcatcaccgtcataacttttagaattttctatcgtgtattttttcacatgtcaccaatcatgcatgcccagcattgccaatctgaatgcgctgtccggtccatttgtcgtcactgcgcaacaccggccagctagtgccatcggccttgatcaggctcaaatctagcttagtgcccagtacgcggaaagttgacttctccgggtcaattggcgcaaagagagtatatgtatcctggtagcgcttgttgtccgtggtgggaaggtcgaaactaatcgagttggtagcaaactcaaccttggcccgttgcttgtcaatcttcttgagatagagggagacgttcacggcggtgggagtctggtagaaatcgttcctgtaaaatgcgaaagtttgtcagtttgctgttttcaaaccagaatagcagagctagtctgcccgtatacgcacctgactgtgtccactttctcctcgcccgggggcttggccttgccaacaaacatgtgcctcgtcttctctgtgcagccggggatcttcagaaactcgtcgaactcgagcacccggcgtttgcagcaggaccaccccttgctgccctcgtggaagaccggctggcccgggtggtggacgcacttctcctcatcacgagcagtcgacccagtataggacgcaccacaacccctccgacggcatgttgcgttggcggggacctccgcatcaggatcatcagactcgggctcctcgatgactggcttctcgggcggtgccgcagtagcgatagttggggtagcggagattggtagtcgctcggacttcttctgctccgccggtgtaggagcaatgacttcctcggccttggagggttcaggcacaggtgtgtcatcgacggtggaatgcttgccggtagtgcatggcgggatagagaggaattcctcaaaggtcaagacgcggggcttgcagcatttccagcctgagaagttagcggtgtcgcggggtagaaatgtagcagaagccagcggcaagatcaggtatcacattgcgctgccacaatggcccaccatgaaccgttggtggacttatgggatacagatctggcatagcttgaacaccaaggtacttacctttctgcccttcgtggaacactgggggacccggatgatacatgcagtcttcttccgggtcggtgaaggcctttccgcacgctttgtggacgcacttgcctgccatgatgtgtagcaagacaaattataaggaaattgacgggactgagtcgagagaagagattggaaagtgttctggagagttggaatggcgcaggttgcctaacagggtttagcggggaagctcgaatgttccatcgcggagaactctctgaccgcgttcgcatcacggcaccaccggccatctcgaaacaccgtggttgaattcatttcttgcataatcgagattttctctccatgtttcctacgcatttacttctcagttcagcccgcttgacgctgtttacacgtgcgggctgcggcctatgcgataccgccaaaaataccgtgcttcagctccagaaacggcgcccctttgaatacgtcgaagcggacatcatggagcccgggaataaatcttggaaggatgtttacgagtttgatgttccagtcctccacgtccagtcagttcacaatggcttgcccaaggaggccaatctctccgacgcgcgcaaattgttccatcgatggacagagcaagaagtcgaacgatcggtagatgaagccgagaagacacagtcttgatgattttacttggtgatttgtccaactgtaccgatttgccatgatccaccggcgggaactgcgcataccggggcatcgacatcgtgatatctcacccgcaatgcacgtcgcgcttgttgtattatatctgtctactcgcttctccagtcctgctggccagacctatcttgccacgcacatcccataagggggtgtatttctgtatgtattcgatctatctttgaccgtcaggtggatgatgacagatctacctaaataccctatcattgtacaatatactccgtatgtagtccctatttaaccaggatgtcttgattgtcaaataatacttgctctataattacaattgggtttcccacacaaatgcctcaatactccgaactcgtggcatacctatctagtatgtcacagctcagtcattttatctcgtctcaaactacccaagtggactgataattattatatgcacacgtttacaatttccttttgtacatatacgtagatagggctattatcgagggcatccaaggtcaagtataagtagtacatatagtacggagtaaatcgatatggctaggcggtaaggaaatagccacccttggttaactaactcctaatgtactcagtacggagtagagtagccctttccagatatcatcgtcactatgcaagaagatgcggcatatcattcagggtctctgatttgatgcggtgaggttggactgaatcttggactcttgtttcaccttcaatttctcgtcgaaatccgagtttcacaacaatctgacattgtgaccctcacggttctgccacgcgactctacgcgttcccatcatttattcctcggcaaatcattccagaacaagatatttttgaattccgtagtaagcggttctcaaatccgatctgtggtgctggcgtaacatctctcgcgcgcacagtgcaaataattgttctcgcttcactgtgacgcatgtacttcgcgaaccaaccaacaaccatcatcttcatcatattcagttccacttgatcggttgaaaaagttcagttattgatattggtgagtgtttttcttgaataaaaggctctttgtttgtggctttatgaggactacagtcaactcagaactatgatcccaactccgagaaacgcagactaatactctcacattcatcaatctaattctttactcatttgattaggtagctgaagccgataatgcctgatcaaacgccaatggcgaatggcgccgacatttcgcggccaccatcggcttcatcatcaaggacttcttctgtacagtcaatccaccctctaagatttaattgtacgagatgtaaggcaaaacacaggcgctgtgaccgaaatagaccaggtaagtaccccttgacttgatagggcaacacaattgcaggtgcattgatgactgactatttgcatagtctgcaacacctgtcggaccttgggccttgaagctgaatgcttatatccttctgcggccttagcggggtatgtctgtccgtgatatcagcttggccgagtcaaaatgactaacttatatcatctagtgccgagaacataatcaccaagaaaactggtactccattctcagggccaatgttcaataatgattatgctttacctgctttacccacaacaggtgacaaaagaccaagagctgcagacagttcttctggacgaattgaacctgtcaatgacgtggttggattacccatccaaaattctttcagccacacccggcagacgcagatactccagcagcctgctgcaaagcggtacaagatatccgaacttagccctgcaactggaaaagccacaagcacacctgcatttgaacgaggtcaaattgcaccatttggcatactcagtgggagcacactggatcctccaccgcgtatgcgtagtatatctcctactctgcctcaagacgaaatggagctcaggtgcaacttgaccaccgaaatcaatgtccagagaatgaaggaacaccgtcttacagcagggcatttgcgtaacatcatcaagctactcacgaaagccaagaccgaacgcccaaccactgaacccacgattgccggatcgagtgctatactgtttgacgagtatcgtgaggaagatgatctcatgaggtttgcaataatcaagctgaaaaggggtggccaatgctctcgtgctcttctcagtcgatttgagaatttcgtatatggcccattgatgagtcccgaggagaagaagatgcaagagcgtgtcatatgcgttgaagagtgcctgtcaactaactcggcgtcactgacagtcgatcataccgacctgttcctcctccgccttaaaagaatcatacttcatcctgatgtctatggcttagacgagaatgacccacgcatcgccttcctgcgagacgagctccttacagccatggcgactgactcgaagctgagtcgtccaatccgtaggaaattcgcggaacttttagacccagatggagagattgccggtatcagcgtagacaatccaggcatcgaaaaagaaagcccagagtcgaggaaggtgctacccaagcctacttcttcacgcgtgccttcctcgcacgcgccagaaacaccatcgagaacaataacaacaagcaaacaaaactctgtcactgctctgtctccttcaccgagccatccctctcttttccccccactctctctttcaacaacccatcctccccctgtctcctctcctatttcatctttatccccaccacctctggaaacgattgatttgaccaatgataccatgtcgtcgtcatttcccttcatcgtgaagcgtacgcctaagaagcgtattgactctggcagccagtcgtcgcaatccaacagcactgcagcgtcgcctttcgtagagccagcttccaagaaacgtcctgcttctggcgcgcagtcgtcggacctcgacaatgttatcgctccgtctcagaggcgttctgctcctagcagccagttgttcaactccgacttcccaaaaaggctctggagtatcttccttgggaaacaggcttttttcttgccaattcttgatctcgaccaactgaaaatcgcttttaacctggccgtaaaccgtgggaaaattgaccccacagtcattgacccaactctcgggctttgtattgcaattgcctgccacctggctccttatcagaaccttggggaagcccgcaagtggttcgatgcagctttatctaacatggctgacccaatcaaatctcgaccttcacttcaatctttccaccaccaaattctccaggttcactatctccatatggtcgggcacttgcgaatggcttgggacatcttatctatgtctataggcagagcgcaatctcttcggatgcaaactatgcatggtggatgtctcgccgtggacgaaaagtcgttggagcaggttcggctggtatggcagtgtctctggacgaagaaactattcctcactctccagtttggcgtggtcgatcaatccctcgacagcttttacgacccacccatgccgatgcagtcgcatattactgacaacatgggagtatctggcaagcaaaccatcgaacaatcctatacgacgtcttcttttttcattgcttctgcttcccttattaagtgcactgacgatttgatcaccgttgaaaatgatctacgtgtgactcgcatggaatgtccgatcaaatggctttctattgtagacctacgtggcttccaaggactgaatgagagactctcgagctggaagaacggtctgcccaactgcctggaatggagaggccctgacatcgaatgtgctatgcagaaagaccttcttattcgccgcatgtccctcctggctcatgtgcgatttgtctatttccgacttcgtcaataccggccgttcttcattttgagccttcgactttcccaaacgtgcgcctgtgaaacgagccctcatatcactggcaaggatatcgattcggtggatgcgtctcctgtgctcggcctagtgtattacagtgctgtcaaatgtttgagtgctgcccaagacattgtgaaaactttatctgtatccttcaccaccacagcagatgagtatgctaagtgtgagcagcttgaatatctctacgctgctgccctcattttgattgctgcccggacagttccgcttgtcttgaacggtaccccgcggggtatatctgctgtatctgctgctgccaccacggcgaagtccttcacagcgatgaccgaggagctaaaggaaattgacgtcttgttgcgcaactaccaagagagttgtagacaagccccaaaactcgaacagagaatcgcacgttcgcgtgatgttctcgaccagatcaaactacagtcagagtcatctaatggcatagtcactgacagcgacatcaggcttgagccagttatctggaaccggatctatgatagactcggcctcaatgttccattccagcgattctcagaacctcattgccccgctggctctgcgatttcaggccgtagaaaaacactcgcttggctggaaagtctcccagtggatatagaccttgaaaattagggtcctttctgtcgttgatacagctgcgctgaagcgctggcaatttcactgttctgtagggaggaatttacccgtggatcctttcatttttagctttgaaaaatgaaatccctttctaaatggttctttcgatatgtagatatgtggtatctggttagtggttgcgcttgatcgtggcagtctaagttgtaatggtcaaggcttcgctagagttgaataggagatccaagaggtacaggactggctagggacatggtgcgtggccttatatagcaaaccagcggaaaataataatgatcctacgtggggggattgaaccctggctggttatggactgatgtgtcccaattaggaaagggtgctatataggtcacattaaagatgtactgttacttccaaacccaccccgattagctcagtagatgggggctctgaagttctcgcttgggatgctgagagtgtatatcttcaattggtttcggacttcatgaccccggggcacagttaagatcaggctgcacctcctaaggctgaacgagagaggatggaatgtgtcgccacacctgcagggtaattgaccggggccgaagtccgaagggggtgtgcggtcccaacggatggaagttcgtgggtttggaagccctcttttctttttctatattgacattacttttcaacgactcacctagtgttttgtcctataacttctcgcttgcaaccagccacacggtacacaccctcgttgctgtgttctactcgagcctccaattatccgttgcatgctgtcacatctgacttgtaaatcgccacggaagaatgagaagagaccttgaggtcccgagacggtcgccaacttattcaccgaggattgactccctcattcctgtatatttctcgttcgacatctcattactccccccgccaggcaatttgggccatcacagcatttccccttcgctcagaatgtgttctccatacaccaaccaggctaacaacttcgttcctcgcatggcacagaatggtcatttgaaatcaagtacaagctattcatcaccatctatcgcagataccctccgctgtggacctatacctgaggagcggtggtgtcatcgacgttcagctaagaaagtcagtctacaggggaaggccattggtatggacggcgaaggtgagactcttacttctatcaatgacttaagatacccggctaagacaaatgacacagagcatgctgaactcgttcacggaaatacagagaaagcgggtgcttgcaacgtatctttcaccgaagtctcgatcacgtttatctctctaccagactctagcaccgactgcacaatcagcaactgcgtgttaaaccctgttcctacacctgacaagcaatcttatgttcagctagatatcccgcttgctgagacccggatgtcgtgttgctatcagtgatatactggctcgaaaggaactcatccaagaggtggtcaacagtctctgccacgcatactttgagatatactgtcaagacttcaagtagtacttgattatacaccctgcatccctccggcggactgtttccttgtgtaaaatcacgctacattcgaaagtacatggaatccaattccatgcctttgatatttcattggaccaccaattgacaagcgcaagagcacggagttgggtttcctattgattggtgagttttcaagctactagccaatgagcccgtgatcttaaaatcgatagaatctgaaggctgtgcatgatattttcatctgtaggcatactgccgatactatattggattcactgtcgtcaatgctcctaggaggtgcgctatctctccaaacaatcattgatagtatatattaatcattccaactaactcgtctagctatcaatttgacagcatataccaatcctaatagcacaggaacctcgatcagaggcccaacagtcgcagcaagagcctggttactatccgcaccaaacatcgccactgcaacagcaatggccaattcaaaattgttgctagcagctgtgaagctctgcacagtcgccagcctgtatccgaatcccaatttatatgcaacaaggagggtcacaaagaagattatcaggaaataaacgataagtggtgctgcaactcggaccacggatacaatttggtggaccacatggcggccttgcgaggcgaataagacaaggatggtgaatagcaggccgatgagagaccagggactgatccatttgaggaaggtttcatcgtaccatttggcagaaattcgtcggagcacgaaccgcgtgacgattgcggcccctagaggtattccgagaaacaccgcaacacttttagcagccgttgaatattcgaatgtgactggatcgccactgatgacgctgatgaagaacacccccattggagcgaaaagaaccatttgcagcactgagttgagagcgacgaggatggcacaatattcgctatcgcctccggctagacctgtccaaactagtacctggaagaagctagcggttagcattgtctcgtttccaagagccgtttgagtggtgtcgacttgccatagcaatgcatcgtgccaatccaacaatgatcagcccctgtcgcaattctggctcgtcgggcaaaaaagcccaagccaaggccaactagtggaaccaagtcagtgagaaactccgtgtcatggaagtgttgggatcacggaccataagaaaaggggcaataatccagttcagaaaaatactgaaggcgatctggatccaaatatctttcgctcgcaaaacatgatgcagggattcaaaccgaatcttgcacaagatagggtacatcatgaccagaagacccacagctagaaatacatattcagttagcgaaaactacaaaatcattgctggtttcttgtgcgtaccaatggggacagagactcccacaaatttccccctttgtagggcaggtcctgtgcttgggacaaagttgcccaggatgattccaattgccatggcaagaaaaatccatattgccaagaatcggtcaaggataccgagacttgagaacatggattctttcttctgtggctcatctggagaagaggtctcccgttgcttttcaatgtcgcatgtctttatttggtcgttgggaggactggacgtacatgtctgtggtcgtattgatgtcatggcgagtgaccaagtttgttcggttaatggttgatagaagatatagtggtcggatttgaagatgtagcatggaatttttgtattcgtctagatgtgtccatgaatatttatatttgtataggtctagatggtagtggtatgtcactgacgggcgctgattggctgaagtgccaagccgaggccaaccaatcagactttggtagtgacattcctcataggcggcggggtatccggggtattctggctgcagagccaaccgcctgagtgtcaaatctctcaaacctcaagctcggaatttatcttgacataatgtcagccgagcttccatggcatgctgcatatcccgcaccaaggggcgcggcaccctccatatcacgagaagagctattgcaatggatccgagagggtaaacaagcaggcaaagactttgtacttgttgacttgcgtcgcacggactatgaggtacgaactgttcgaaaaaagcgacatcttcatgcgctgatttatcaaaagggagggacgatccaagggtctttgaacttgccagctcagagtttataccccacgatcccaacattatattctcttgtgtcgaacagcagcgtgaaatatgtgatttggtattgtggtgagctttacttgatacatatgatagcgatatcttgaaacgcgaatactgatctgcattcagggtcatctgggggtcgaggtactcgtgcagccggctggtttgcggattaccttgaagatcaacacgataaagagatcaagagcttggttctcacggggggcatcaagggatgggctgcggctggtccggagtatacatccttgatgaatgggtatgatgcctctgtttggacaaagtagaagcactcattaaatgacatgatgtttgtcaagtttccatcttataaggggtctcgtaacttgaagagccgttttaccaagaagatttcttcggatattagttatgtgctcgaccacatcgtccgattaggtaaacttcttcggtgttatctcttcggcgggtgtggtcggtgggatgtgatatacatgcctcgtctcgaagtagatatacatgtatggtagccgttggttgagacatggtcccacgatccaattggatttagcattgtgcataatgtgcaagtcaccttacaatgcaaggtgtgttaaagagagtataattaaacttggattaacctagcgaggcccgccatatccaaacagtctcagaaagatcctcaatacaaatttccccgggcagtattcttttatgcagattctcaagctaaatgggtatatttggagctattgacgcccaggcacacatttactcatttctccaaccccctccaccagtgcgctctgtgaagttgctcttcaatatgtcagtaacattaccgaggcaagacataatgaataccaagggtacgcggactagatacctgtgttcaaccttattcaattattggcgagatgagggtgcgaatgtgtttcagagaggttcttatcaagggatgcacgtcgcgtttcttgttcttcggttgtaggctcaaccggacttggagcagcgacctcgctcaaagcgccatattcatctctatcatcatccccagtatctgtctgtggcttgctttctggtttggaacctgaatctttcttacggccacaggtgaatattcgctggagtttggaaagcgtcatattatccaataaatgagatcaaggcgaaagatgctgtacaatgtaagaggagggtttccaatagaccggcaaccaagacccaggagactataaatgattggccactttgctacgtcatgactatgaaggggtgggcagattatcggatacgtttccgagttggcccgagtgttaattgggctgaaattgtgtcgatgatcttcagattcgaaatgaggaggttcatcgtgtagtccgtatgtcgttgcgattatctcggacctaacgtgccgttgttcctaactccgaccttggcattcttgtctcaaccttccgccttgtgacttcactccctcaactatagttactttcgaagatgactctccaaattgatcaaccgcctcttgagcaaataagttcagaagattcgatggacatgttggatcctctggctcgaagacgactacaaaatcgcctcaatcaacgtgcgagcagtaagtggcacttttatttgccacccggcattaactgtgcagactaacaccatacacaggaaaaaggaaggcgttagagtataaagagaaaagcaatacggcagaaaggaaatgggttctctatatcgatgattcgaacatctcaaaaaagaatgcatccacagaagaaggaacaagctatcaagttactcaatcatcgccacctcgccaaaccgaagtctctttttgttccctgagccctgcccagcatgctgcgcttatgaacaaattccgtgcaaaagctttgcatatgattgagaacccgaccctcctgcgaaatcccacctttagcatcacccagtacaatatacttcgagctatgttcatcaacgccgatctcatgggcctcacattagagcttctgaatgaagacctcgcgtcgcagttcaatctcaccggtccattaatgtcagcgctacatctcccagcaagcttgtgcccatctcagaaacaaaagaaaatcatccaccacccctggatcgacttgattccaatggtatctctacgggaggccattttgactagggcggatgtaattgacgaagatgaactgtgcggcgatttttacggatcttctccttcccaagaagtcgggcttcgtgtttggggcgaagcttgggatccatctgcttatgagatctcggagacattgatcaggaaattcagttggatggtaaaggactgtcccgatatcatcaaatcttctaatcactggaggaaacagcgaggggaaaagcccatcaggttcaagatcaaatgatatttcaatgcatttataataaacacatcaaattcctttcaaatgtctattccttacagcgaaaacttctcctgggtcagtttttcgctgagttcccacaatttagtccaattgccttcgtcgctgaggtgcgcgtgcaattcgtcgtctgcgactgcgttccggttgatgtatgatccattgtagcctgggggcaggattagtcgaagacactataaaacgggttatgggaggtgttctgcttacctgcgatggtagggtcgagcattcctgtgatgaggccagcggctccctctgaggcagtggaccatgggggcacttcgaaaggctttccttcgatgtcgaccagggctaagagatcgtttagtgaggagcagaaaacattcaacaatagggcaatccatacatccagcctttttccattcttcgacctggtccaaaaagtcaggagggcagtgtcgttgcagaccggttagaacagctaaatgatggtcagctagatccacctaaatagtaagaaggagaaataagacataccaccagggtcaatactaaaaacgcggatcttctcgcccttcaacttctggcctagtcttttggcaaacatgactctcgcggcgttcgactgggcatacgcgaccgtagggtcatatgtccgaccatcctacaaggaaacggaatgtcaacgtggttgaatataacgggtaagtaaaacttacactaaagttgtagtcatcgaagttcatcttcccttgtttagccatgcccgaggtcatgataatcacagacgaatcgggccccgcagcacggatcttcggtaggagcaatttgacgagcaggaagttcgctagatagttgactccaaattggctctcaaatccatcctttgtcttggtgtaaggcgggaacattactccagccacgcatacaaggtgatcgatgtgaggcacatctgctaggtctccgacggcgtttcgcacggcggtcaagtcactcaggtccaggttgaggaagcgagtctccacgttcggcttggatgacttgattttctctctgatgcctgccacctttgattcagcacgggcactcaggatgagtagttttgggtcggcggtggaaagctggagcgcaagttctcctgcgatggagttgtcggaaacgccggtgatgagcactgtgatgaagcagcctctgtcagcgcttttttcttttttagatgaggggaatatttgattacctgtctttccggcaagtgccttgccatacttctcgaggacaacctcagagcggaggatttgctgcttgttggtcattttggatgaaggtgtttggaaataatgaactaagcaatggagaaagcaaagaagtcttgattgatatatcctccacttgactagacacaacagtccactttataccttttctttcggcgataatgggattaagtgtttttgaaaggcatcgctagtatagttcagatggaccaatcatgacccggggaaattcccactagaggtcatcccttgccgtatcgggttagcccaatgtcatcaagtatcagattgtttcttcaataattattcctaagcaattagaagatgatagaacgtaatggggatatactaaggacttaagatgaaatatccgttaactcctactacagtcttggctctatgcaggcgagattacatgttagaacatgttgaagtaggatattatgatacaattgcactttgataatcacaaaatagagtacagtaaactaactatagctgcacaatgtattccttttgagaacgagggaaccgaaatatgtctaaaccaagagaacataatcgatcaaacggataaagccacctatggtgcacatgtacgatctcccctcattgtacgacttgtagaaggattgccaatttagtcatgctattgaacaattagggagcaccaactcatattaaggaccacttaggggcaatagtcatagattgggctaagtacaagggtgaaatcactctgttgaacttccgttccttgccttctatcggcaatgactcggggctcaaacggagatgggttgcattgtagaaaacgccagtggcaatgattttagaaagaaacacaggctattgatctcatcgttgggtttttgggtgtaaatgggcaaattagaatgatatccttggaaaactcctcgcgaaaccatggaaagagccagagtggttgaacaatccgcgacagccgaaagatcggtgcgtggttcctgcaagacccgaagagcccttgctaataagaataagtatgtccttagcagagaaagatccccatttggcaatgagtatatcataacagactcccgtgacttgactagatagcccgatgcaacaacggacctgttgacggaagactagagacatagatttgggccaagacgagaaatggtaaatgtgattattagattcaaacaggaggctaatccagagccaccggcccgattgtctacacgtattcaatacaatgcgccaaaccaaataaaacaagaaaaggtcatcacacatatcagcgggcaggcatgaagtagcagtgccccaaaacagcctgctctagaaccacatgatgcctgcaacgagaccgatcacaacggccatacagcttccatggagctcatgtgagtgccgaccagcggcagcatcggtggaatcctcagcgccaactttttgttggggcggtgcttgctcagatgcggtgattaggtcttgatttgaggcggcagcgttgggaattgtggattcgggtattaataatttagaagcgccgttgatctgctccgcggggaatatcgatttcgcataatttgctccgtggagtccgacgcgctttccaaaatcaatggcgacatgacaggcctgctggaacatgtcgcggaatgaggcaggagatggcaacaatggcgtctgtatgctgtcggaggaattattatatgacaagatgtttggaagagattcgatgtcggatgcggttggtagggattcattgatggtgatggtagaatccggatgcgtcaagcccgtaactaggctgcggttggaaaatgaggcgaggaatgggtagtcgtctaattgctggatgaagtaggttctgaatgcgcgggctctgcgactgaatgaaaatgaggattcgcgggttgacgatgcaagtcgacttttatttgcgacagcggtcgtttcgctgggcgggaccacagcggcatttccaacccgcgcagtaacgggtgggcgattacctcgcgatcgatgtgacgcagcaagaacccatgatttgcgaggctcgttgagcggcggtgctttcggtgctaattcggtgacaccatcttgaaggagagggacatctagacagtcgacttggttagttgactcggatgagctgggtggcggaaagggggacatacggcgaactgcgccggtgtagaagctgaagtccgcaaacttcgagtggtagagactcggtagtgacggcaccaatgtgagaagcgaaaacacaatgaggatgaggagtggaagagcaccaggtttatccaagccagaccgcatcgtccctgctccctggctccgtccagaagcttcggagtggtgttttgaggttcagacttcacgggaatcgaggagaagcaagaatgacagtttcaaggccatggaggggacaagctcgggtgtttcgcggtttcaatgcaacgttccgtgagatgcagtgtttctgcagagcaacgcgccgacgcgcagggggggctggtctatctagaaggtggccggggacgagatttaggagcttgaggatagaaaagatgcgaggagggcacagatgcggtgggttcaggtggattcgacggggttaagagtcgaatgaagcacgataaggagccctcggggtaggtggatgcgcttccttggctcttctcttttttttttttcgcacagagccccgagtatgacgtcgatgaccgttttgtagaacaaaaacaacctggacttatttgaaatgtgccgtttgatctggagtgtataaaatccccctctgccgaaaacgtcgaggaatgtttcccacgttggccgcattttgacagtttgagggtttcccttccaacaatgtgggcctgaggcatcaccgtccctagcaacatgtcgatcaccaaagagaaaaacaggattctgcattaaagatcctggttgttcagtagttcatcgactattttatttattattcccgctttagccctcgtgcatagtgtgatgtgcgctaagtctattgctcgtggcaaccggtgagtaccgaatgtcgtgacggagaacttccagtactccaacgaaccatggctcctaaccagcatatatacatcactacctaggtatatgataagtatcggtgagctaacaacttcatatgtagccaaagctgctgaagaagtgggggttatttctggctatacataagtaccccgataggtagttagtcaatagcatagagcgcaaaacatgtcattccatcgtcacgtgaatgaaaatcatcacagcgtagcgcatatttacaggtctcaaaaagaaatgcataatgttatatacacatatgcttggtaaaagcgaaagccaagagaaaaaaataaaagaagcgaaacatgccaaagacaaggacaagaatcggagcatcatctcttctttaatcatgcacattcccgtctccattaaaacggattcatcatagaagcatcaggaccagccggccggctctctcccccacgaactccagaaacaggagtagatttcgtcaccggaactggcgaaacggtagtcggcacactaacatgactaggcgagcgactactgcgactgtgtgagccaccaccgcgggagacactgctcccgggagtgccggtactggaaccaggcttcccgccgcgtttgaccatcttccccagcacagtgacgatctctgcggcgtcttcgaagctttcgtcgtccatgccttcttgggaattgtagacgtccgcgatggcctgttttgcgaggcggcggcacgcaatagggtcttggaggcagtcatatagataggccgcgtattccagcttgacggagagacgcagagggtgcgagcctggtaggagtttgtcggagagggttgctgcgtggttgaagcaggctgttgctgtggctgtgtagtctaatggggggaggaggaaggaggagatgggttggggtggctgaactggttgcagtactggaaggcctggaggacgggatgttggtgttgatgccgcattgattttggacttgtaggggtgggagacgccgagggcggttagggtatctgcgccgtatatggagtcatgtttgaaacgtgttggtatgtcggtgtcgggagtaaaaattgggcgactgtggaataggacgaagatatggtagaaggaagcgcggagtttgtaggcgagcactttcagctccacaaacctgtctaccatggggaggatgtagccctccagtattagtaggccttcacgggagagccatataatacgatggtacagctgaagggatcttgtttcacgtgttgtgtcgagtcgccgcagcttgcgggctctaagaagcttttttgatagcatgacggagactccgaggactttgtatagcattgccgagagcaagggattttcgaggtccatgacggccgcgaaattgcccagggccttctgatccacttcggaggaggccatccataaagcccacgacccggaaattaggaagtctgtatatatcgagtcagccatgttggtcatgagtctcaagcaacaggcgtaaaggttcggggaagaccaattggccgagactcaattgcgaggctagaaacccctcaacagataaatgaataggcaaagacaacgccaacttaccgaaaagcgcgcaaacagaatttcaaataaccaaacgcagcgactgaatcatgctccagccacgcgcgtatccccgagccgcggaccaattgatctacgagatcgatcttggcgtacaaaagtccaaactattccagcgatgcgccggagccacaatacggaatatccgaaaccaaaaacaccaagttccgcgcaagctgcaaggttcagctggaccgagggggcggcgattgttcagaccgcggagtatatcacagccaatggctttagtttctgggagcgggcaccaaatccaattgcgacaaccgagtatataatgtttgaattgtagtaggtagtgcggtccgcgcgatcaaatcaatatttcctgttttgatctagcgacggccgagttttgaatgtcgtattcacgcggtgtggtggctgggaatccggctagcaacgcaaggagcaggcaatgaggtgacggagctcgtggctggattggaagtagaaacgcatcgtgcggcggcaaagtagggggtagagtgggcgaatgcgacgattttcagtgccggcgaagtctgtgcggggaaggaattggggacttgtctcgggtatgaagctactagcccgggggctcgagctagaagtgctggggggttagtgttattattgtagatgttcgggctacctgtagggagtcaagcccgtggattaaaagagaattaggaattgaaagatattcgcagactgcaaaaatgcaaggtcatgctagctgcgtggtttcccctgatatgacgaagagatcgggttggactcgggataggtgtatggagtattgtatagtaatggttactagtctgtcttggagtcccacagtcagaacagaattgtacaaaattgtacagaattcattggcatagatgtgctacgagtggaggtaatggactatttgtataaagcagactcagtagggtgcaattgcagtgcccagtggcaacttctctcactctagtatattaaatgctgtgctgtcctgcactagtctgagtttcgtgatgtcaattgatcctgttaactccctagtaatgccaggtttgctacgtggcagcggctcaaggcgagagacaattagggcagcatcgcagattggctgggcactgcctggctaaataggtgcccaagtcctcgggccagattactttgaatgtacctgggcatggaaaccttagcacggactgccacgctggcagtggctgtgattgtgtgtattggtattattagtgtagttatgatagaaatccacctatctgatgtgatggaagtgagaattgtatgttatagtgttcattgtacaaccttggacatccattgatctacattcactatagaagaataatacatcgttgatatactacagctctgcaacttacgttgtgttctcaaattaccgtatctgagctgttacaccgccagaatgatgcccctgttgatcgcccaattagaccaatccattgtatataactgtacagtatgttgcagacaaattggtaatttaaggtctttttcatttgactgtaatttttacgcctgttttccatatccaacgacagccttgtacatagtagtctccactataagtctgagatgcaagctatgtatcgtgcatgcaagagtaaccaaagaaaaaaatgctaaaacaaaatcgccctattcatctaggtcatcaactgggaatccaacaaatgcgcgcctcaagaaaacccgccagatatcgttcgctggcttcttttgcttgctagccgactcagcgccttggctattggcatcgctggtgtgcttttcttcaactccttcctcggcaattctagctgcgagttggaagaagctgcgtactgtcaggtctttcatttgatacacgtcatcatttgtggtgtactcgatctcgtagtcaagacgatgatcgtggcctcgtttgcctgccgcgatctgttcgtggatttttgttaggtttgagtaatattgagtgtagccaagcatcgtaaacgcctggttcgagtatgccggaccgggaggggcggttggcgatgggggctcggggactttgaaattgggtttctttttcttgtccttgccctttttcttcttcttctgaatttcgggtggtattacagagtcgtttctggtttccggtggatgaactgcagcatgatccagttcaaacgttgtatcgtcaacttcacgtccgaacaaatccacaccatgtgtgacatcgagtcccgtggtgttgtagtcgatcacgcgcagactggggaagaaattcgggaccaaactgggagacactagcgatacgctgtatcgttctgcccacgggcctccaatcttgtccaggaacttctgcttcttcttcttctttttacccttcttgtttgttccaacctccggggagatatctcccagatttgatatggagtcaagctccttgaaaatgtccgacggaggagatggcaatgaggaccattggtttcggagtgactgaaggtagtcggtctttgagctgatcgacagcttcccgttgacatttgaatcaatgtcgaccttgttgctatcctggagcatgaagtggtcgatgttcatatggccgtaaaagctgccgacaacaatgtcacggtactggtgcatccagagcgtgtatttttgccagcatgtttcatcccagttctttttctcgctcgaccgggccggggggacatggcccatgaggatcgctttcatattgcgactgcgcaagattttcaactgcacccgcaaccactccatgtgctcgtatccaggttccgacttggcattgcatccatccactgcgctgttggaatcgaagaagtacatggtgtttaggctgatgaccgctagccgaccggggatcacttccgtggtgaaccaaccgccctcgacgaatgtgtgacgctgatcttctgggataaactggtcccatatctctgcaaatcgctttgtccacttgttcgggcccttgttgaagatgttgtggggcatgatatcgttattaccgaatgtcgggattacagggatcgacattttaggcacgccattcgaagtcccaccaaccccttcctcaccgaaaatgctaatccatttttgcgacaggaaggcattcaaatccaggacctcatctgccgtgcgagggagcttctcgtcattgtcatgtcggacagaatcaccagtccaaatcacaaaatcaatctcatcttttaagttttcttcgatccaacgatatgtctcattcacaagcgataaagccgaatcgcaatctgtgccctcggctccaaaataccccgcggggcccttaccacggtggcacgagcgatcgatcgaggttccgggcttgtagaggcggtcgggatggaaatctgttggtcagcatgaggttacacaacagaaatatcaacatagagaactgtctcctaccagttatatgcaagaatcgtccgcgtacaggtttgcgcaaaccctccgccagctgcccactaggcagctccgttggactgagacggcccaacggctgttgtcccaaggggctggcggagatggcgtcggcaaagaggcccagcagcaagaaaattgactgcatgagtcctctacaccaactggtacaccaagagagaaatgtgggtgaagttcaggacctcggaatattttgggtaaagatcttatctgcacggtcacgtcactgggcgggcgcggtagccgaaccccaactcacacgcgtaaccaatcagaggccggtggtcaatttggggaggaatgtgaagagttgataaatggtctttactgcgaactcagtataaaattagaaagttagagttaatctgatatccaagacagccaatgacttcatcacgtgccaacggccttgaggggaccttgggagttcaggtagaaacttttcatggccagatccctcgctgtacataagaagtcctttctatctgattggtgcaaagtgataggcccgacgtgtctacttcgtactattattcccagtagtattcttcgttcacggtgtatgtgatgtacacgcgaccgtcttgtccgacaaagatctccccttctccaacgaagatcctttcctcgagtgtcatggccacgtaccgccaatcattggtctagaatcatccatcaactcagcgctatgtaggacatttcttacagatgctttcggcttgacgcgaaggaaaaacgggccgctgtagataccgaaagttagccgtgatcctcgatatatatgtaacatggaaagatatacagctgatggttccccttccaccttgtagcgtagcatgaatggcgtccgcagtgactgtcaaatgaccacggatgtaatgtgaatcaactaccgatatgtaaataggtgaacaggccaaatgatatttgttgaagttatggctcacgccgttgtctggagtcctggagatagaagcgatcagcgaaaggctggcgctccgggtcctcctaaacatgtgtactttaacatacatgagctggactgttgcgtcaaggaatgtctcctcattgagtacaacatgaacgtatgggctgtcgacattgatggcagttgcagtcacagtcgggacaaactcgggaaatgtctctatcctagctcgggtgccgggctattcagataggcaggaatgttagtaaaatgagggtcgttcgggatgagagatgcttggtgacttactactgcgacgaacccttcggaatattcagtgcccgctataaagcggcaaacccgtcagtgaatcagtgacattggacaaagtgctacagatatgacctaccaatttcgagttggccgagtatattcgcctgcatgattagtaaaggttatgattgcggatgatatgatggcgagagacttagaagtcgggaagaatggaaaaggaagaaagtaaaatgagaaaggacgagtggcagagggtagagagggaaagtgcacatccatccaacaagcagaaggtcgtctaaacaaacgcacatcccacggtcgccaaggatagacttttctgactttttgacatcggttcctctgtgaattaccgaggcttatacaagcatcatggtcttcactttacgtgatatataatgtgattaatccctacggttatggaaggcatatgatcccgaaccctagccacctaggcagtattatgagttatcttttaactttacataagaataatataaagccttagacagcctgagctatccaagtcattgtggtagtctcattgatagacgtacgtaggtagcatctatgcccagaagcaaaatggagttatcaacggatttcaaagatagagatcacttgcagctatgtactgatgtatatagcttcatagatgcgaccatatgcttgcgcctcctggctccagcttgacccagggcggccagaatggctatgttgcatgctttatgtatatttatggaagcaaaaaggattggccgagaaatcttccaggacacagaggacttacggccagctatatagtatagcttgatagaggacaaagagggttaccaaagaggaagtcgacaaagcgttcataaacagaaaaaggcataacaaactgcacctgtaagcagtaagcatgctagcgcgggatatgaaacaactcttagtagagtgcaagctatataggatgagcttcttgattgataacaagcataagaaacacataatattggtagtgtcgaagttgagtcttgtacatttgctgactcatatgaactgcccgggtggtctagtggtatgattcgcgcttagggttaacccaaagcattaatgcgcgaggtccccggttcgatcccgggctcgggcccattcttttttcttcttcttctttttaaattgaaggaatctaatatggaaatgctaaaagcgtcatgcgaaatgtcattttgattagatggcaagaatatgtgagggccgcaaaagttctgcagatcggccgatagaacgtacttgcccatattaaccacacccttgttttttttcgctaatttaggttgaagaacaataagtatacatagatcccgcacaaatatcctaaaatccgaaatcaatacaaaagagaagaggtaaaaaaaaaaaaaacaaggggcaaatccaaggatgaaaagagggagaaatcgataactaacgtccatgaaccgggcatacatgatgatgatgatcatgtcctggtccatagttttcctcacgcttatgttcataacaattcatataatgatcgaaagttccctctgcgagcagtcccctgcgctcaagtctaagcatcaggtaacaagcccatagttggcagctctgtagtggaacctctctagcctctgcttcgacagtatggatgttgtctcgatgaatttcaccgagcaagtgtgtggattcgaccgaccagctatcaaatctcttgttatattcgatctccaagttacgattccccatgtagccggtgctgtggagtcgagtgcaagactgagaatgtggatgcctcgtaacgagcatccaatggatgacacccccctgcggcttgcaaatttgaagatggagttcatagtgacgaccgtgatcgtgtcgtcggtcacgaggtgtgctgtgggcctgtgaacgtatagttggtcctcgactaggcatggttacaatatgaaaggttgctaggggctgatatctgtaaaaaggtgtgagtataacgagtatattgacgatttttttgagtggaaagattgtttgctgtgatgatcgagttaattctgagcaaggactcgatcgttcttatagatattcctcgagttcattgactcgtgggttatacaatgggctaataaaaatcctttattaaacacggattaacaaagtctttgttgcctggatgcctttacaaacaattaggctttattaatctaattgtctaacaaagactttctataatctcttccactagcctaagatagctagcgttatgtctcctatattagatgacatcgtgtcttctttgttaaaagggtaaagggttggaagaatattgttcatgtgtcatggaaacaagtaaaaatagccatcaatatacctaattcaagtcaagctttcaattcccagagcggggtaggtgaggctgagatgagatacgatgaccttcacggcttggcatcagatggatggctggtccttgaagggtttgtcgacagcattcctgattatgtcgtaggatctctctgtgcttgttcacatgatttatcttatggcaggtacatgcgctcttactgcattgaacttctgggtatctattatagcacttcgcataggatatttatacatagacatggaccgacttcttcgagtccctcatctcgtgtacttcgtcaaactcattattattcccctccaggatatcatccgtgctagaattatccggattaggtatcaacgactttggtgtcaacctccgagatctaggcgtgggcaaagagtttccaggatatgaggagctcaactcgtatgcgctccgtccacttccggttgttcctcggccggatcgtaatagggatctgatgcaaggtatcgatgccgttatgatgactatgtaggcttcgatgaatagccagcgatcgtagttgacggttgcgacagttgggtcgtcgtctgcgtgagcgaagacttgggtttgcactgctttcataacggaggctgccattgcactagatccaaaataactgcgttagccggtatatattttgaaatgaagtagggattagtggctcacaaaatgcccaatccgaggagtgtgaccaagcccaacttgacccttaacttcaaattcaagttccagaatacgtatgttgaaaaaactgccaggtaaaggtctgtggctgaattaaacgctgttgaagctgattattagtctcagatgtagaccagggcaatgaatggaagctcgtacagccctgataatacccgtagtatgcttggacgcggtaatcccagcatttgtctttcccattctgcgtccagatcgcagaaccatgtccagggcattggacaaatagaatgataatcaacatcacgttagtcacgatttgtaacccaactatgacccacagtatcactctgtgtgatctcctggtgcccagtagctgaatgacaaagacaatgaaggagatgcgacccaaagtaccgccagcaatgccgaatgtctgtgtcaaatagtcgtacatgatgacttttggaacggctgtggttgtgttaaggtcccaaacatggcgaccgaagccatatttgatgcccacggtaatcaaagctgatccgactatagtaagacactgccaggtaacaggtcagttttgatcttccaaaactattacgcgacacgtggactaaccaatgccgacaccataagaatgtcatcccagccaatcttccggatctttatttttgcaatcaccctcaagacgactatgagaatggcgatccccgtgagcgcccaaatgtctctcaggagccttgggccgtggtcgtcgaggtcgcctcgaactgagagagacatatcgctcggtcgatagcatggaatttcccacaaaaaatcagaaaggatgcgagaggcatatctacagatagacatcgatccattgaattccaaatatgcccgatgtcaaccggctatattagccttttatcatatctatactttatcaaaaaaacaaatctcatcggagatgtccatgtggccaacccgagcctcttgacccttgtcaaccctttcagctgtaacttagatagccttggaaagtataaagctgaggacgtccgtcggaggtctccgcttgaaaaagataagatatggccttgacctatgaaacctcgcaatatcccaaaattaaaaatctaggaacgagcccggtaagccatagggcacgcctcattaaaaccgaaccacgtcaatttaaaaacctcggcaattcagatgaatctatgcttccagattgattatatgctttgagaataccatagttaagagtgccaagcctccctattcaggactagtcccattttaaggtagctcttcgggtctaccgcccacgcgaccacgttatttctatcaattctattggctcagccttctatcccgccttttcaggtgaaaatctgccggattaaaacacccattacataatgcagaatcagaccttacataaccccaccggggcaaagctcggacccctcactgtaatgtcgagaaccctaaggttttgatgacgtgtgctaattaatctacgcgagggatccgaacagcggctctcacgatccgcattttcacatgccagaggccgtttcaaggtttgtttgctcgcttagcgataacagttcacgatacggagaggtcgacggtttgagttgtttgccaaggtgggactgccttcatctcatctcttcggagatcccccacgtctctcctctcatttgctcccatctccagtacagacttcgacttgagtactttgctgttccaaggatctggcttgtaataaccgagggatctttggcgacatagcttcggtgggataggtttggtgggatgtcttcggcacgataccctcattcggtaggatctcttcgctaggatcacttcgggggatgtgttcggtgagatatattgattccacggcgggattcttcggtgtgatttcccgtcgtagcttgctcgcgaggtgacatagagcggctacgtcgaactcactgtagtcaaagagcggagtttcttctttctccatgttgtgagccaaaatgtttggggcagggagttgctctgcttaagacaacttggtaaatccctgagcagcgaaaaagtgacataatgggcaagtatcagatcccaagggcgtcgttcccagggaaggaacatcacatctacacacatgaccagtaccagtttggactatgagatatcgaagttgaattctccgtcatgccgtatgtttacttggggtatgaatagtgaaaatatagaagtttggttgttaaggtagtcggctgcggatggcagcagcggcattgtctgatcctccactcgttgagtaaggtgacattggcttatgcgccttcgcggacgaggggccctccttggcccagtctagaagatctgtatatcccacgatcctagtgttttgttcatcgtcgcccccgggaacgctgaccaacgatacgtactagttcaaacggccagtcgtctgttctgccatcttgttggtcgttggcctagtaccactggggatggggattttgcttctaagttccaggtattgaggtcaattgagctggctggctctggaaaatcggtgagagcttaagggtttcaacaaggtgagggtacttcgattcgtcaatcaagcgagagtaggtggctgggtcgagactgcctaaagcggagtttccagcgacttgtcgaaataggatgggggatagtccgttttgagttagtgagtctgatattcttctgggacgaggtgcgtggaagatcccgatcacacatggggggttggagccatttttataggcaaggtttcttggcttggtgatcctcgagcaaaagaggagagggctggaagttcggatgccagctcagagggtttcgaggtgctctgtattcctgagtgctaaacccgcgctcataacttgttgaaagagcttcttgggaatgttttcgtaattgtgattttctctaatcacatgatatacgcgtgattattttggcatgagaacgcgtcaaaaaattactaggccttgtggtcaacagcattgcagcccctacaatttactcttgacaaggccattacatcccatacaagcctaacaatattcttactagtatggtgaccccagtagtaaccggacgtttgcttgttctccactgaatatttctcattggaaaaacatgcgacctggtctacagaatgggaactgtttaaggagtaattcataagatatcaagctagtttgagaaagagacatttgaaattcaatcttcatatccgacaaaataagataaataaaacagaaaaggttgtatagtataaggaataaaagaacaagaaatcaatacctcgccagatatatttcaatgaagtgtgcataggaaaatattcattcttggctggttctgccttcagccatgtcaagaccccactcaaccttgaggtctgaagtaagtatacccgatttcttgagaatcatctcggcaagagccgggacagattcactggtcaaaatctcaaggatctgcaaattagcttccaactcgcgggagatccagtttcggatctcgataccgaccagcgagtccaagccgtaaaccgtgataggcgcagcagggtcaaggtcttccatcggacgcataagaatgctagagatcttgttgagcacggcagccccaacaatggcctcggctccttcgcgggtcttcgattgccggataacaattgctggtgaaatctcggcaccgctctgtgcagactcggccaatgcatccccgccagcgagagtagagaggcgcaacaggtgcgacagcttggtatcgtttacccagaagggctgttcactggcaggtgtggatttgactgcttcaaacccagccacgcagtgaccctcgcatgaactgtcgaactcgttgcggattgctgccgttacaagaccacggatatcagttgcatcaacggactctgtgcccaattgtttggagattgcctcgcgcttctgatcgtcggagagatatccgactccacgcacaatgggcaaatcgattgttgaacagcgcatcctggctgtctcagggtactgggcgagcgcagccatgaaggttccactggctgcgtatggtgattgacccatattgcctacaaaactagcggcggacgataggttgatgaagaaatccacggtaccattagttgttgccaatgcccgttgaacgttccagattccgtggactctgggcatcatcaccgtttggtagtccgcaaaactgagcttttcgaagagcgtatccttacgagaaagttagccgagatcttatctgttgtttgatgctgataaacttacccggagaaccatggcgccgtatacaacaccacgagcgggaggcatgcgagcgaggagcggaacaagatcttgctccacgctctgttggtccgccacatcgcagcgacagacttccacattaacaccctggcggataagattctgaacagcttgctcggccttttcagtcttaataccacttcgagaaaccaggataagattcttggctcccctctctggcatccagctggcaatgttgaggccaatcccaccggtcccaccaacgatgatatatgaagcgtccgcgcggaggaggttttcgtctcttctggcgggatagacctgtgtggtgagttagcgatcatttgctccaattgtcgtagatatcagcaaacataccttaaccatggaatcatccgtgacctggacgactatcttgccgatcacctgtccaccctgcagcgcacggaatccaatctcgacgtctgagataggaagagtggtgacagaccactttgattgggcgttagtgtcaacaaacagcttaaacgcatcacgaagcagccgcttcgtcaattgcggacgcttctctctgaccattcccaaatcgacagatgcgaaggagatgttcttgttaaagtgagacatctccaaccgagagtttgtcgtgatgtcccgcttgcccagttcaatgaaacgaccaaatggcgcgacacactcgaatgttgcttgcaaagcatcaccgctaagcgagttgagggcaacatccacaccctgaccaccagtggcgtgctgaataccctgcacaaatgacatgtcacgactgaagaagatatgatcctctttcagctggtaagtttccataaggaagtttttcttttcgaggctgccaacggttgcgaagatattagctccaatgctttgagcaatgattattgccgcttggccaactcctcctgcagcggcgtggatcaggacgctctcatctttgctcagtctccccaagtcaatgagagaatagaaggcagtacaaaacacagctggaatcgaagctgatgtctcgaatgacatgtcgtcaggaataagcaaggatccagaggccggacagcgagtgaaagttgacaatgaacctggtgacattgcacagactcgatctccgatcttgaagtcggacaccgcggctcccacttgagtcacgactccactacattcctgtccgagtctttcaccttgaagctggcccatggccatcaagacatctcgaaagttgagaccggtgctgtgaacctggatctcaatgtggtcttccggcagtgctccgttgcgggaaacatcatctgtgaaataaagctcatcaagacccctcccgtctccggcagcaagtcgcaaagcccgatcttgtttgaaaggctgcatctggggaggggcatttggtgtctcttgctggacactgaggttcaatgtgttattgtcaaccaagcggggcacacaaacattgccatttcggacaacaaactcccagtcattctgggccagctgcgatttctgacaaaagactccgttaaataccttgagcatatgcttcactgcctcagcgtcgggcatgttctcccgctctcccaggtcaagcgtggcgaattggagcccagtctctgatctcacagtgcgagctaatccaattgccatgttcgcaccaagcgattccaaatcggatttgctgtgacgaacaacccacagtagaccccgagcccgactcagaagacgctgcaatgcgttgaatttgtcttgggtgagatgcgataggatcgagcgatccattcccccaaggaaaatacaccattttccggtaacatcaacctcatcagagttgacagccgtgatggggtcaaccccaatcatctccttgagaccagattcgagactgagcgacgaaaaagtgccgatcgagtcaacgccaagaatcacaacatcaccggcgtttgcgggaccggttattgggatattagcagtggatgtcatgagacaaccagattggaaagatgctccagggtactcctcgacacacaggtcaaccccggagaagtcattctccttcatcacattgctccatccttcgacggtgaggaggggtccgtctgtgcggaatttgtcattggccagccaccatccagggaggagtgcgaatgggaagtggcgtgccctggggacagtttcctcgatgagtataaccttgccaccaggcttcagaagtcctcggatgtttgccatcgtctggctgatgtcggtagtagcatgcagcacattgcaagcaactacaacatcatatgtgccattggtgaagccttggccagtgggatcagccgacacatctagtgtctggtatgtcatgagatgtctccagctctcgaactttgtcttggctttttcaaagaagccgggagagatgtcggtataagtgtagtgcccaaaccgaggcgttgaccctggttcgccgcccagactctgcaaaataggcatggtagcaccgcctgttccagcaccaatctcaatgatgttgagtgtagggttttgatgtgccatcttgtcaacgcagacagaggcattggcataggcctcgcgaagagcgtcaagatcgctgtagtatcttccgattccatcatcctccagaagtacactcaaggcgtctacctcgcccctgaggatttttggaagcaactctcccactttgaatgccagctcacttgctccatcaacggttcggctttgttcaaggacgtcaagtgataaggcatctttggtgcccgcctttcggcaagttttctgggcccaaagatagaattgccgatgatggggctcgaaggtagacaaatcatcttctgtcacagagttgaccatctgtgcaaggtagtactctgccacatattcgagttgctgcattcgctcaatgccttgggcaacatcagtctcggggcgaggaagctgtcgataatcttcggcggagaggaaatcaaagcagggctcatattgcatcttgtagcaaatctgatccggcgaattgtccgttgagcctttgatatcattcgatatgggaaccaaagtaataccattgatgtcaatgagcagattcgccgggttgctgggaacggtggcgaatatgcggtttgtctcagggttgctcgcggactcgtttcctgacccactaccatagagttggagtacagtaccagcacttatttcgtgggacaatgaaacggagatgtgcttcacatgcgatggcacaaaggtggtatgcggcccgggttcgccgtagccacgaagcagccacatgacttgactacatagatcaagtgtaacaggatgcagaatgcagggggtctcatgcccatgtggcattgctgccttcgtgtctgggatgcgtaaggtagcgagtgcttggccatccctgctcacagaggcttcggttagcccttggaagagaggaccgtaattcacaccaccgttggcgatattctcgtagaggaaatcgatatgcacaggaatattacaggaacttcgcatattcaatgcttgttgagtgaagcgtgctgtcttctcgagctcttgtcgagacccgtcgacaggattgacatccttcgcttcttgcaccatgatgaaaccattgcagtgttggtcccatccgcgaccctcggtccatgagaaaaccttgaactcgtgccagccgaggactgatttgctgggggcttccgatcgggatggtttcaaggtgagaattgtctccaccgatgagttatccgggatagtcaggacacggttaatgaagatatcgcggatatcgatctttccgggagtgacatggtgcagctgtgcatgttgtgaaatagcctccatggccatggccaagaatccggtcattggatacacagtgcggtcatggactctgtgctcgcggatccaagggtgatcatctgcacgaatgatgttcctccacctaggttcaaagtcgacattctccatgcacaatgagccaaggatatcactccgagggaattggggatggaaatggttatcacctatccgtgagctaaaccagtatctttccgagtggttccacggatatttgggcagatttgtcaacaaagctggctttctcgtcgttgtcttcaagttcgggaagttgatagcttggaagtcgagattcagaccctgtgtgaacagcgagccagctaggttttggacagcttcgatgtcatctaccttgcgtttcaaggtatgaagataatggacgttggaatttggggcgtatttctgcgcaatgtctttgacaggtgtctgcagcgcagggtgagggccaatttcgactaatgtggtgattggcgtatttgcctgctcatcggtgataaggctcttcagaccctccacaaactccacacgagagaccagattgtccacccagtaggaggcacccaaggtgcttcctgggaccaattttccatagacagtcgaatggaatgaaacctcagagtcccgaggtgcaatcttaccgagtaggcatctatattcgtgcgagacaatcttcatatgatgggagtggtaagcaacctcaacttgcaatctccgggtgaagatcccttctttgtccaaggcagtctgcagatcgtcgatgacctccgcgtctccagacaaagtcacgctggactcactgttcacacaggcaatgacagcctggttccctcgcatagcatccaaaatttgctggatgtctgaggcgctggctccaaccgctaacatacctcccttgatagacttgtcatttgctaccaagtttgccgcgacaccacgagagtacgccacacgaacacattcttcgaaattcagaatgccagccgcgtaagctgctgcaatctctccgctagaatggccgaccactgccttggggcgaataccccaggatgagagcaggtcaaccaacgctagctggaccgcagtacaagccggctggctcatatatgcggcagaaatagagctcgcgctcgggtcggtcaaaagcaattcatctttgcattgcgaggttagtgtctgagtatatcgctttgggcagtgtcacaattgggttggagacatacctataattgagaacgtagcaccgaatgatttcaagcaagcgtcaacattctgcatagtcttcttgaagaccgggtaggtgcccagaagttctttgcccataccgtgccattgcgcaccttgtccagtgaagacaaagccgacagtaggctctttggaagaacgaacaggcactgcgtcgttagatagagatgcattcagctcctgtccaaggattgcagagcatgccaacctccatggcaggaatgttcgtcgctgtcccagtgtataggccatattatccaaagtgctatctttgaaaacaaccgggaaaaggtcgaggtatgttccgattgatttcccaagctgaagagcagcctgtttatcgtacgcagagacaacatacaaccttcgcctgagaggatcgttgttcgctgcaaggtcaccttcgtgccggggaccacgctgtaggataacatgggcattggtcccgccgaagccgaagttgttcacacttgcgtatggtttgccacggggccaaggcatgagcttcttgggaacctggttggatgtttagctcgatccattgatacctcaagtcggtgcttgatcttaccttcatattccagtcttccatcggtatctcatcatttgccttctcaaaattgcagtttgggggtacgaagcctcgctcaagtgccaaggtagttttgatcacagaaacaacgccgctggttccttctgtatgaccaatgttcgattttacagacccaacaagcaacggttgacgcggagtgcgtcctttgccaaaaacggcattcaatgcagtggcttcgaggggatcaccaactttggttcccgtaccgtgagcctccacaaatcctaccaaggacgggtcaatgcgtgcctctttatagacttgacgaatcagttcttcctgtgccttgccatttggcattgcaatacctctggtccgtccatcctggttgagaccactgttgataattacagatcggatagcgtctccagcagcctccgcatcctcaagagacttcaatataatacatccagcaccttcacctcggccaaagccagtaccgcggtgatcaaatgcatatgagcgaccagtgtcggaaagtagtcttggggattaatcagcttttgtgggtcaaggagactgccagtgacacttacctagaacgtgtcattgagatgaaagtctcgggggttatattgaggtgacatcctcccacaatggccatggaacattcaccgttccggatactctgagaagccagatgcagagcagataagctggaagagcaagctgtgtcgaccgtaacactaggcccgttcaagtcaaaataatacgaaattcgattcgcctgcaatgccacggctgttccagtggcagcatacatagggatagccgtgatatctttggtgttgttgatttcgtagtctgggtatgaggcgcctgcgaagactcccactttttggccactgatctcgtgactcggaattccagcgttctcgagggcttcatacacacattcaaggaaaatacgctgttgcggatccattgatctcgcctcttggagtgtaatgttgaaaaatggcgcatcgaataggccaacgtcttctttcaggaagtgagctcctactgggttgaaggaacctggtcgatctggatcagggtgatagaaggactcggcgttgaatcggtttttcgggattagcgaccaagcactccgtcctcgagaacacaggtcccagaactcttcggccgtggaaacgtcgcctgggaggcggcaggacatgccgatgatggccattcgcttgggcacatcgcctgtggcattatcggcgatctcactaggtgcttcgtgcaaaaatgcattcgcgctctcggcaactggagttccagtcccggagggctgttgaaggcgcatctttgatagattcggtgtttggtttgaagatgtcgaattatgtacctggctgtgtcccaatgtccaacaagtgtccaaagagacaaatatggatttgcaagaaaagatatgtatagaatagtacaatcacagagcgttcgaaacaggcactcggtccatccaagtacttcctgaaaggcagagagtaaacaacaagggcgtcgagatggtttgtacaacatagagtgcgaaccgcccttgcataaacacccaagcgtgcgcgtgccgatctctgtccagtagtttcctgattgaaacaggggatttaaacactgaatcgggcaatgataggtcgagagaacgcttatgtctgtcttccttgatgacgaatctaacaactcgcagggacgtcaatgggatcatccatgcatgaaagtatcccctcgattcctcgttagaggtttccaggattgtagatcgagatcagtacatctgaccttgtccatgtatttgcaatggtctggatagtgttttctccgatgcccttgctaaggcgagggtgcgttctccgtacattccaaacacaggggcaaactcccgggaccctggcagattcctgatggcataatttgttattggtgcctcctcgcgtagcaagtatctttatagaaccctccgggtggtattccacctcgcttttttctccgaagatattccccagttgattatcgcgatgaagtttctatgtctcccaggtggctattgcagtgccaaggtatgtcaagcattttgtcacgtggaataaaatcatctgacgccgactatacaggctctcaaaacacagctaggtaagaagctgcatttgatgcgatgaacgtcggagagaactaatagtgggtacaggcccgttctgcgatgccctcgcggccaatggaaatgccagcttccactacacgcagggaaccaccgaggtgcatgttcccccagaatcagccgggtttttcggtccgccgcccaactataccttcattaaggttgatgagcctccactggtccatacgaacttgagtgacttcccgaaacgcgacaccccggaagaggcaatgaaagtcgccacaaaggcggctggcgatcccacattttcatgtatcgctgaggtcatggaccgtctggtcggcattcttgacagtgaaggcgacattgatggtgtgattggcttctctgagggcgccctaattgccgcatcgcttattctagaggagcaaagaagagagaaggaacttggtcgggcacctcgacttaaatgtgcgattatgttcagcggatggccaccggtacaccccgtgactggaaaagttctcacggctgacgactataatgaagagccaatcactattccgacttgccatgttgtcggtgcatcggatccgttccttgatgggtcaatggcactgtacaatatgtgcgatccagatactgcggacctgtttgatcatggggcaggacatacaattccaagaaagaagcagactgccgatgagattgctttagttgtacgcgagatgatcgactgtgtggcttgagttttcctttatatagcaacacaccagaaacaacatccgataggctagatttacgcgctatcccggacattgggtgcatttcatgttctcataaatatagaattctcgcactagtctactccagcagcggccttgtctctgcttcttccccctactcaaattcaatctgaccctctgttcgacaccattgaggaaagagaccaacaaaggacgcaagtcccagatcccaaactcaccccctagtgacctccgcccttcctcgtcagcctgtccatacttcgccgccttccaacgccatcgggtccggcgcacaagccacaattatccaacccctagaacgcccaacgccaacatcccgagcacagcaactattactgacagaacagtcaaggtactcgcatggcacccaaatggcagagctctcagctcccatatctccttagagccaagggggcagatgctttctgggccgacaggcgcaagtatcggacccgtgataggttaggaacacaggtcgaggactataccacaacaatcaatagtcagcagcatatgacatgtctgataaatcaaagcaaaagcaatcatgagatccgtggtaggtgaaatgtggccttgaaacccccattctgggggctggggacgcaagggagcaggatgtgaaacgaatacgaggggaaggttcgcatatcgactgcaagttaccgggaagggagaggaggggagaatcagactcgactacgagaaaaagctggtcataagagaatgcgacctactatacaatatggaaaagcggatctctggaatcagggttgtccaaggggaagctagagttttccaggccattcatcactgtttacttggttaaataccatgtaaggtggttgtggtatagctggttcctgtcctcaatagtcagatttcttcccttgcagacagagcactttgcccctggtgagttgcgggtgaatgtatagtgagataaaatatttgcgagaaatcccatgtgttttgtatagagcttattattttgcaacccaacatgagactatcaattggatcaaaagttgcgcagtcatgcatttttgggctgcggtacttttgccactgcatcctcagggcatctacaacgcacacacatacaagtcccacatgaagggtcatctgagtcactgtggtggtacagagtaatattatatagacttgatgatcgcatgacaccgtggcgtgaaaacgtgataaatttatcctggtgaatcgcgctgaaaacgaactggcgcagaaataccaaaagccacaattgtcgctcatcgatgcataacaaaagggaaaaggagatgttttcgctcaaggaaagagggtaaatcttgttcagaccacgcgcttgacctaaatatggagcattagtatatcatcttccggtgtctcaatcaaaggaacccacgtacctcgaagaatctcttgagccaccacacctggaacacaccctcgccaataaccaccataagttggaacatgctccaccacttcacgcggccgttcgtgctctctgcagtattgcggtgcactcgctcgcgcacgacgatgtacgactgctcatcctttacctgcgtcaaagcctcgctaagtttgcggactagatggtaccagatgatcagtcacaatatccttcatcttccgtcggctgttatttcccacgcttaccttcgacctcgaggggatcctgcgtcatctcatgttcgggcacgtagacaattccgtggacgttgaaggagacctccttggagttggaggtccagccctcgttgctgaagcagtagttgtatttcccgtccagctgtgcggtgaaggagtagtcgtcggaggcaacagcttgcttgaagtactggcggtttctcaggggatcctcgacctgcgacgaccgagcgttagcatctagcttattttgaatcgttcctctatcatgatttagcagctggcctagtccgtaggtaggcatagacctctcggtttatagatccgatatcccatgccagagccaccatcagagcagaagcggactccctagcaacaccgggataattcatacccagaaatcaacctcaatgttattgctccctccaaactcccgatctccaacctggaaagtgacagtcatgacatcgtcgcggtgcagtgactcgtggaagcattctcgtgagtgagacttgagctggatggtgtgtgcggtcgcggcggtgatccaccccagcgcggtgaccaggattgcgcttgttgaaaatctcatattggaatatttcggctccgatgagtctggggtgattgacgagtgcgtgggtggtgatgttggtgttggccgtcaacgtcaacgtcaacgcgcaaggtgtcaattggcggcgctcggaccacttcagtaaacaccgctccgccttgagattcagtcttggctgtatactggagttgggtggatttagattgtgatatgaataattatgttatggttagattcaatgggtctctcgaaggattggcgtctattcgaatgagaatctaacacttgtaaagttataccgcaacatatatatcgttacattgtacgtcaactacaaacagcgagagtctttgtagttatgtacaagcgtactgaacacttgcataagaagagtaacgtagcagtggtaaaaagtctgaattcattttgaaatagtaaacactcgaacagtgataagctacaagaaacacaacgggaaagcatgtatatcaacaagctacatccgacaatatcacaacaagggggggtacatgataatatagaacagtcaaaaaataatgaatgacagagattgactattaatatgtatagaaggcatgtaaacgataggacatgaaaaagaaatgtaagtaggatattcaatgtacaagttctttggggagatgagaggtaagaggcaagcggaataacggggtggtatcaaatccgagaacgcaaacattgatcaacggccatgaagccggaagatatgtatgtatgtcgaaagggggaatatggatataacgagaggagagaaacccgaccaaacgcagagatagcaaagatatcacagattgaggattcgtcctgtgggaatttttctgccgatagaaaaaaaaaaaaaaaaccaaattaaacaccgagcggagatggagttcagaaaaatctataggtaagatcaagggcagcagaatcactcttcctcagtggagggttcatcagaagaggaaacgtcagcgtcggcgtcagcttcgttttgaatgatatagctttcttcggcttcagcctcatcaatcgtaggcccaaaaggactctcattatccctctcccttggcgaagccgagaccatcccatcaacggtactctcgttctcatccgcgaagctcccatcctcgtagttcgccggctcggcatcatggtcataactcgagcgacggagaagaggcggcgtctgaggcggctccatggcaggtacctgactgcgaaccgcgccacgttttggggctgagttgaagcttctcaaggggcgagtttgcgcaaaccgtgcggcagcactagtctgcgagccagtaccgttcccgcgggcgtgggagctcgggggtgttagtaggcctgacaggaaagtactcgcgttgctgggctttgacggggtctgattggaggcgttggcggcggattcgcggccttttcgccaatttccccaagcggcagctgcagctagggggagggagcggggtgaggcggcaaggtcggcgagggacgggaggttgccggatgctagccgttctttttcttgctgctgcatttggagattggccttaagacggatggctgcgtcgcggacggcttgctgattgaatgcgggcttggacacagtgtcgattatgtcttgcaggtcgtcaatgcggacgcctaggagctcacgcagccaggtgatctcggtgtctttctccttgatcttatttggcgcatctttatctatcgcggagacttcctgttcaagctcctcgatacgtgtctcgcgctgctggagctggtcctgaaggacgaagattgactcgcgcagggcttgaggggagatccgttcgggttcttcagatcccttgttgtatgacatggacggcgtcgcccgcgagtgcgaggttgcggcagctgcgaccgagctgggttttgccttggcgctgtgggctgcctcagcagcagcacgggcagcagcttgagcgatctcaaccttctcttcgaggagatttacgcgctcttggagatgcttagccttgtcctcggacaaagccatccgctccatgttatggctttccccgcgtgcacgatcctctgaagagttatgcaaagcgcgagcgtgacgttcgcggaggtcattgagaatgcgctcatgcatcttgcgggtctcatcgatggcaagatccttagctgccagggcggtggcctttgagtccctggcttcctcgaggagaagctcgtagcgctcgcgagaggtatcggtatccatgcggttgttatcaagttgggtctccagacgaataatctgagcctccagctcggcacgcacaatgttgacctggctgttagcagcttcgaggtctgcctccatcgaggagcgagtgcgctggatctcgacgcggctgctctcacgggcttcgacaaactctcgctcgaaccgggcagccttgatctgcagttcatggttctccgcccggaggctagtgaccaactcctccagtctagccttgtcttgctgagattgctcatggacgaaccttaactttgtggcctcccgttctttcttttcgaattcgtagacatcctcctcaagcttctcacgcaatttgagctcgcgggagtgtgacgcgcgcagctcattatacctggcagtgtggtcttcctcccttctgcgccagacagcttgatcgcgagtaatttcagcagtgacactgatcatgtcatcttggagacgatcgaacttttcagtgaggttctggcgcgagatcatgctatcctcaatgcgagttcgcaggtggtcaacggtctcatgaagagacttgttctcacctctggtagtttctaattgacgacggaagctatcgctagagagacggtactcgtcgagggtaccctcaagcgcgatgttcttcgtagacaactcggcgatagtaaccttgagagtctcgctctcttccataagagactcagtgcggaactgcatcttctcaaagtaggggatcttctcttccttgaactggagcagacgagactcggcatcctctgcagcagcactgtgacgagcagcatcttccctagcaagcttcaatagtcgctggacctcagtcatagcatcctgcgcgtcacggcgatccttgtactcctgctcggcacgctcatcggcaactcgcaacatacccttaaggccctcgatctggagcatcaggctgtcggcaccaatctcctcggcctctgacaggcgcgggctcgggggtttctgcaaggcgatctgctgagccaattgcttggccatggcttcctcgagaatctcgcgcatatcaccaacagggtcctgagcgagcttcttgatcgtgagagcctgcagttcagcaatgctttctttcagctgcgacatctcgtgatggctagagtgtggggaaatgcgttgagggatgtcatgggtaatcaaagcttccataacgacattcttgagcatttccagcttacgttccctcgtattgtggggcgagcgatcgcgaaccgaagcttcctgaccatcatcgtcctcatcatcagcatcactgtcttccatctcagcggatgtgctgcggaagaccattctgcttgcagtgccactggcaatagaagccaccgactgctgaatgacagccaaggcacgttccacagggcccaaacgatcatcgatcgcagagccaacaagatcgttgatacggcgatcgaagaagcggttacggttcatgaacttctcgtcctcaccggccgatatcatgtcgtcccagtcactgacatggtcattttcagtaaagagctggcgaacaggagactgcagacgagagataaggctcttctgcggagagaaggtagcattgctgttggcatccatgtccgagccatgtttgggaacggtgagtttgtaggtcttggggactccaccagggctcggactgggtgcttcgctgcgggcatccgcagagccaaaccgcttttccttcgtgggaccgcccatcgactctgtgaggtgatcgtgtcgcggctggaagggggtcgcgtggatcgtttggtaaggagtcgcgtggcgctcgatgccaacatcggcgtcgtcatcgtttagctgttccataattgcattcagctcctcgtcgtcaggcgagtcgttctcggagtcccaatgactgtcgtagtgcttatgcttgcgggtgatgaagtctggttccacatgggttggggcgttggactcaggtttagcatgatgatctgacgtggttgtattcttagatgggccagtgacagcgaatcgagaatccatgagtccagcttgcttgtgtttcatttcaacaggactcgagagagtgttttcgatgggctgctccttgacgatatttgctgcaacgggttttgtttcagcaaagctggaaggctgcacagtcgtgggaacaaatttagaaacagcaggcttgaactcgaaaggctgggcactagccgatagcatagtggtcttggtcgagctcttagatccatgaagagcatggtcgacatccttcgagacagtgacagacctatcatctcctgctgcaggctcccttggttcacgttcttcgataacaatgtccttagaggtccgcgcccggatcggcgatccgggttgagacccgttctcggcctcacgtttcgcatcgaacaaagtccaagtatcagcttcactgacaggggtacccgtccggtctaccagattattctctttgggaatggcattctccttgccgtcagcgacgacatgcagcgcactcgaagcttgagcattgcccgcctcgcccagaggttgggtcgagctactatatgtagcctcgccctcagcgttgccgacaccgcgacacgcacgcttgtggcggtcggtcggtacaggtcgaccattggtgtcgtcttcaacggcctgctttttgtcattggtctcctgttcgatttcatcaggtcgcacaataggaatagctttagacttcttctcgggcgtggtaatcttgctggtgtcaatgtcgccgaagattttggtgcgactagccggaggctgctcggagctggcattcgagttgaggccaatagaggagttggggttgaaaacaggtgcgtcaacattgaacgatgcggcagagaatttgaatccgccactactactggcattgtggttcagcttagaactcattggtccattcacattcacagtgctaccaggcacgaacgagggaggcggggcaaaaccaagtccttggcttctgccgaactggaatgggtcatttccgaacggcacaggctggggattgaatgatgcattagggttgaatgccttggcctcaacgttgagtgatgaactcgagagctgcgactgatggcccccgtggtaggagtggccgctggcctgtgtctcgtgccacggtccttggcgagtctgtggcgtacccgcgacgctgggatttgtgtcgaggtcagacccatcatgaccattctgttggtattggtctccgtagatttgctgaggaagctggtgctgggcgaagggatgaggcgggagtgggtggttttcgttttctggcaatccccagcccgacttcagtatgccggcattcagccctgcatggccgttgacatcacggtaatcatcctctaattgccggtcgatcgagtcttccaaatgataatcggtatgtgtcatctggtccagccctctttgcagagtctcgctcagattatgaccgtgacctcgaggtgtaggctgggcaatttcgacactcgatgcgtggaaattatctgggtgtccattgaccggggtcttaggagcctggtatggcaggccttcctggtgcataccatggccaaattgagcatcgaacacacccttatcgttaaatgccgggtagaaagacccttggtcatgtagcggagacactggtgatagcatggaggaaaagttgcccatggcccctggcccagccgaagaagttggctgccgggggtttatgaagccttgaggagtcatagctccctgagcaggaggcgtgggctgaaattggaatgggaatccacccatcatattttgatccgcacccatgaatggcgtctgcataccgaattgcgaaggtgatgccatggttcccataccaccaggcgtaggcattgatgattgattgaaatgaggcgagaatgggtgaatatggccgaggggattgcttgctgcggacgcagtaggaatcggcggggatgtaacaaggcctgggaaaggcgtgccgctagggtttaacgagtaatccggtgaaatggattgtgcaggttcatcatcgccgaatgacactcccagggcgcgtagcttttcttcttggagctcggtgatataagcctcccacttggccctatctgggaagttgacgacaagtggctggctcttagatatttcatggaggtcatatgggtcgggatataagggtcggctgagacctcctagagtcgtcattgtggaggggtcctcggaatcgccaatggtgaatccacgaacatcgtatccttcgtcctcccattcttgcattcgctgctgaacgtcggccggtgttaggagacgatacccaggttccgagcctctcctatcgtcatttggcagctcgattatgcaggctttcccacgccaattcagcttctttctccgtcgtggtgtcggggtggctgccctgctgatatcagggacatgtatttttaatggacccgggttgaacgggtcttccatctgtgcagcgtcctccatcgcatctgcaggcggaggaggtaacggcttgtctatcggcgagtttacctcgacggtaggtgtgtttgaatttgacatgttgtcttgcggtggatctttatcgtaagcgaaaccccaaaaatcctcctgccgcaaggtatcagcgcgtttatgctgacctttgttgccttttgcacgcgcagcggccttcttcccgacgaaatcagagagcgttggagttttcaatagatcgtcggaacgaaagtcgtcctccaaaccaagccaatcgtccgaagcgtcgtcagcgaagtggtttctcgcagtgataaacgatggcgcttcacttccagagtcgtcgctaagccaattgctccgctccgttctaggctgaccagtaaggtactggttgatccaatcttgcgtgaagtcccgaatcgatttatctccgatattggcgacgagatcgcggtccacgggtacaagtatgtcgtcgttcgcgatactcgatctccgcagctccgtgtggttggctactgacgagacgggcgagctgggaccagatccgttgtcgatctcggagagttcgagttggctattggtcactgacagtctccgagtgctaggtgctgcatatggggatccccacgcggtggtgtagtagatgctgctttccgccttgcgattatccggcgaagaggacccagatccttcggttgcgcgatatgaggataggaatgcgagaggcgggggttcaagggtgatgctccgcggagaggttcgttgaccgggggaaccaacggtcgacggactcgagtcttccgatggcggagacgacaagagtagtgagggagccagacgcgattcacggatgaggcgcgtgtctcgcgactgaaactgtggagaaggcgccgagaaggcggaaaatacggagtgatctagatctgtggacattgaggtggttagactagcatatttggagggatctagagtgattgaatcaagggagttgaagaataaagtccacgtcacggtgtagcgcgaaatagggagaccaatttcacagtcccaagaagggttcaaagagagataatatcaatgcgtatacacaccttccgtgtcgactcctgcagcaagcacttgcttgccgctccgcttatcgtccagaatgttgacgcatggaaatcaaaccggaattgaagaccaccgctggcaagacaacctggggccagataatgtacaggttgtctttttctggtttcgggataggcacactttgcaagtgaatgaaagtaatggagagatcagaagcacggtcaagtctgaagtatcgaagaccaggatggggaactaaggggaaaaaaaggttggacgtcacgggtattggatcttcgtactccgtactgggtacctcctagagtgtggatagcccgagctaatgcggtgtacaggtacgataggcccattcaacgctcactagtattatttgtttagcgcagaccgaggccgttggtttagctgtgttggcttggctttcccgacaaagtcaattgctatatctacgcatagcacatgtacccttaccttttagatccagaattaaggattgactgtaagttgaatgctcatggccactactgtgcttctgctttcgaagtagagtaaacaatgaaaactggagttcccagagattcaggggtagaagaaaagctttccatggatttgactgtaccgtaccactcccgggcgccgtccacggaccctattcgcagcatgactaatggtttgtcttgtcacgagccaatcagcgtctatcgtacaacaaaatggttctaaggagcgtatcttcatgctgattggtgagattttgtccacgggagtcgggtaatatctgttgccgccccgagactagtctaaaggactcgatgttgaactggacgcggagttcttttttatcttacccgcgctcttctccgaaagtgtcagatgctgataatacaagtacatattttgtattgtaactgctaattgaactcagcacgacgctgcagcaatgcccatgttattatttacttatacaatcaaagcagttaagccatgtagccatatttccattggagtaggagataagcaaccccagaataaatcagtacaatccgaagaataaaccgctagtcgcgggcaaggtatcaaagcaaagacacccggatgaagcgaacaaatagtcacaagtcgtctagttggggcaggaggtgtcgaacttgaccttgcggtccgcggtgaacagaccccagtgcttctcatccttcatctcgccattgtcgcccttggtatcgggcttccaggactcgtcgaaggcctcaaagtagaacaggtcaacaccccagtcgagcatgccacagataccagtcttccagaaggtctgagcattcttggtaccggccttggcagcctcatagtcagagccgccatcggtgggccagccggtctcaccggtaacaatgttgatcttgtcggcgttgtcgccggcgatcttctggatgtgctccatggcgccggccatgtcatcgaagtaggtctggtaggccttgtcggcggcagtaccctgccagtaagcaaaggcgttggccaagctacagagagagtcagtattagtgcgcagagttgccgatttcttctacatttccacttacacatatgtcacaacgggctcctgggtgaacagggcgtcgccagtgccgtcagcaagcttgttccagctctcggcggtgccgacaaggacacccttgggcacattatccataacgtggctgatgtaagtgtggagctggggtccagtcaagtcaccacggtagagagtctcggacccgacggtgatcgcatggatgacatcctcgtaaccgggaatggccttctggatagcggcccaatctcccttgaaggagggctcctccaaaagattattggtatcggtaggcttgcccaccctaaagaagtaaaaggtctgttataagaatagttccgattagggggcgagaggaataacaaaaaacttaccacatgcccagaacgaccttgaagcccttgtttttggcagcaggcaggatgttttgaggggtgttgcactcagtgccggagtaagtacggacgagagtagacaggctcttcagggcatcgaaatccgcctcatagtcgctggtagacttgcaggtaccgtcggcgttcttgtcaccgagggagaaaccgagagtgcccttagcagagaccagggccggggccgcggccaacaggagggaaacaacaccagatgcacgcattgtgaaagatgaggtcgatgaaagagggtattcgaccaaagagtgacgaaaacgaaagttgaaaagaatgtaaaaagttataaaatcaaacgaaggtacgtcagggaccaagaagaaagacccagaggattggagattgggggggaaatgagggtttagacctttagaccctgacgggtctggggctttgcctaatgtggaggaaggtccccactaattgtgtatagggggtgagaattgagccaatcaggaggaaggaaactattcttggatccatggatgaaacagttcccctttaaagggtccggatatgttttggtgatgtatgactgtgactttgtcggcctaactacggagtataccattcctatacccaaccctctcctatatttctgctcctcggatcatatttccatctcacatctcagcaagaccttgtatctaagagctaagtctgatatctttcatattttacatgcagctgcagagtcgtgatatcaccttgacaaagcccagatgccaaccaaggtagaagcccagaatctggaaagtcccatgtggagagaaccgatcggatggcaaagaatcacattgtgttgtcacaccgcccctatcctattactcgaagagaaccacagtgacatgtctttggaaccggatttcctatggttcactagaatctggccaggtcgacctccctacacaacactctttatcgcctctatggccgggagtaagccatcctgaaccatatcgagattacaacgtcactaagaagttggtagagactcgaatgagccgagtctctattgttacacagctgtatcaaaaatatatctaacattctttgctgtataacaacctgcagacattcaagcgtacaatgactattctcatagaaggacacgcgcaaaaggtatgcatatacggagtaacatacggagtagttagacgtaccttacctcaaaaactcattaccaccatcgatattcaactcagagacctattcctttccccagaacgctctgatattcctctcaattcctagaacccaaatccaacagccggcatttcccgagccagtattgacagcgttagagaaagtcgcacgagcggaaatagtattcgaaagtgtggatatgtggcgaacgaatggggtacgtagagccaacgtacaggatgctgctgcaaggagtcaatgggggcggatttcgtattgtgtattatttgggactgagcatctggaaatggtggaaacatcaaatatgtaggcttttgttgtacactgggttagttgagattgggattgagttgtatacgggatactgcgtactgagccacgagatatgtcagtgggggcttgtcagaatgttagatgcatggcagtgctctgtggcttgtgaatccagggttagcttagtacatatgcaaatgtaacaaacattctattgtgtggcgcagtcccctgggagagggtatataagggtcccctccccccggatcttcaccttcttttctttcttcttcatacttaccttgtttgggtgactgtgatcaaaaagacagttcaccacaggctggtccctgcattgcacatcgcggcggaacagtctgttcaatggcactcgtgtcattgacaggcgcattctttggcacctccatttatggaatattttcttttcatcaatccttgagccagtggcacgaggttggagaagaggatactgtaattgatgtatcgtagtcgcgtatttgtgttggtatacaactgacgctaagtccttagcctatctaccattgtctttctcgtgaaatattcaaatttgtccccattcccagtccacaaccccagtccgcaatccaagtccccaatccaagtccccaatcccaatccccattcccaatccccatgttgttgaccccgttgaggactctagaccctgagattacctcttcccaacacgtcatgtggtgctacgttttttttctcttttttttttacatcgagctgacattcattgtaagttttcagctattgttaacaagctctatcatacaaagtgtttctgacatgattcatagagggtatgataatatccgacgatgatcgccggtctagacaatgacaaaacgccttattgtttttaatctccaacatgatactatgtgatcctaaaagttgttccaaatccccccaaaacgccagccagctcatattacaacgcgagatttttctccttcagatagagctccttgagagtgctcagctgagtcacagccattgtctctcgcccgagcttacggggcagatcgactataatatagtgcatgagggctagtccatactgtccgaagaagcctagaatcctctcgcctgatgatcgaaggagtgctgccaggagagcaacctgggtttcctgtaactctggaggtggaattgccaaaatcttgtggatagtggcccagaacatcgtgttagggaaggggttccggcgtggagacttcgcgaaatttcgaagcgtcatggcagcatatcccgcacccagagcggtcatgcggtccatgtgaatttgttcactaacccatgaaccagtgtctggtgaacgccaccaacccaggacacggcgtccgccctcggtcttgtcgttgcctgtaaatccccacagggctgggcagatgacacggtatttggcccacatgatgtcggacatgtggagccctttatacgtgaatatatcgaacgagaatatctgagcagcaatgatgccgatcggctcagcgtgggattgcttgatagaggcttcggctagaagagaggatatcaagctctttgcgaggatgttcaatccgtagattagcattgccggtactttgttctcggacttggcaatctcctcaggtgggaatgcgaagaaattccggatatccactgttggctccgggtaggcgagagctttttcaagctcagtcttgagctgaataatctgcgtttcgttcaaataatcaatacccaaacaaccattcggcgagtgtggggggattcgtacctgctgcttatttgcaccggttccagctcgaagctgaccgacagatttcttgatcgagcgtcgtaagttgcccatagtcgccttaaggttagattggctttggcccatgtccttcagccattttcgcatgtccttgagagtcttatgcagctcaacgtaacgtttctgcactcggatatcttcagccgaaaggttcccaccaccgattttctgctgctgttgactgtaggcctttaggtcggcctgttcctgcacctttcgggcgtcctcatcttgcttgagcttctgtgcgtcggcctcttctcgttccttgcggagtttttcctcgttcgcggctttgcgtgcggtttcaagggcagcggctttcttatccgcctcctcctgtgccttcttctcggcctgctctttggcttggcgttcggcctcgacgcgcgcggccgcttctcgttcgcggcgtgctttttcagtcttctcacgttcgatgcgctcttgttccttccggatcgcttcttccttctgcagacgctcttcctcttcggcgaggaggtgatccttcaaggttgtctccgcttcctcgcggacgcggtcgtggaaggcggcggcctggtcgagggcagctgtatggactgcttcacgctcgcggtcgatccggtcgagattttcataaaacgttttgcgctcatactcgtggactttcttcagatcggcgtcaaagattttgacttgctcaagatcgcggacgaggtccagcataagctgcttggacgggctgtccagtggtgggacatgattccgaaatcgcgtcattgtaggggtcgacatttgagtaaatgatttatttatgtgttccaaaaattcctggtggaaggagtggtgaatgttttgcggagaggttatgaaggttcggaggagtagcgacgggaacgtgtgatcaagtgaatatggaggtttcaagtgactgggatcatatccgtagctcgaagagtagagttcagaagtgccgagaatagaacaatatctcaaaatatcccaagctggtatcaatctgaatttgaaggtagagagggaacggcacagcgtgagagcaattggacgaggggttctgaggaaatgcgacgaaggacgaaagtaaattgcgcgtgtagcgaaatattcgacgttgtcgcgtcaaaactagtagaaaggagggtccatggagatcggagctatgtgaaggttgggattagcatgtaccattcgaggggccacaaacaaaatcaagcgtttggctgcattgcataaccatccaataataagcgactcgacgattcaacgtacatcgatgcacctgcttcaatatttcctcaaccgtttagagccttatgaagccaaaggaaataaattacctgtaaagttcaatcttacctccaaggttctactttcaccgctttctatcaccgccttgctatatcggtactttcggaatatcaggctattaaacaggcttgccctagtagttaggaagattaagatacataactacgaagtacagcaaaaagtgatatcaatctgatttgaatctcaattactcacatcaatcaacctatctcctactatttactgccagtctattttgcagccaaagagggccttctagacccccaagacaaatgagtacataagcaagacccgcgagccggttcggttccctggcgcgctcccgcctggaaacgttgacgtttacatcatcgtgagcatcatccattttgacctacactatataattgggagaagggaatacgaggtgttccatgtttctccgatgatatgtaccggacttgagcttgctaccctttctttgggctatgctgaataattagctcagcggatactgttcccatacccttaaaaagaccctagactagccaactcaccactagctgtctatatttgaatccatgtacggattcctagggaagagtccatgtttccgatttgcagactagacacccctatttacttataggctcccattaccatactagatactctaagtaggtcctcaaagcatttcaacggatgcatcaggatgatgataactggtagcaatgatcatccacggctgatgaagcggagtatgacggataactgttagggtatttacacgatccacttcggggttattgcgctaaacgctgtaataaaacgtggtttggtcatttccgaacacgccttctgctttccgtaccaatggccctctccccacacctctttgtatctccagcatcacctttcctcttctcctttcccccccctcctctctcttcttatcccatccctctcttcttccccccatatcactccttcgagtcgaattagtcgatggtttcatcgtctattctatccttccctataatttcagtacttactgtcattctcttcgaggatcagctctgaattcccgttttagaactttggaatcatcccggagacaagctcgttctaacggctttcttcgcttaaggccaacctcaatcctccgtcgaggtgctttttgtctgaattccctttttgtcggttgcagtcgtgctttccagcacagctccatcccctcggtccttccaactcctgttcgaagcttcatcccgttgctaccgtgttgctcgatccaagtttgccctgaacgtgcaattgcctcgactcctacttaacatcatccggttgcccctcgtcgcctcttggacttgtaaagaagaaaaaaacgatcatcccacattgagctctacagacgtcattttggaatgctagggttcggaggtcgtcattagtttcatcttgcaggtaagaagaatcgggatatactccacgcatttactttggaagtttcacccggcgtcgattgcccttgccgctttttcattgttagttgtgaggtcatcgtcgagtccgcttctttcccccctgagatggaagcttccattgggtccgcccttacctcgggacttgtactgttgatattcgctctgacattgccttgtccccctcttcttgctttctctcgttgcttctgtcatcttgcacccttactgatccgctctttgttactcttccaggataattcacgtattgaaaccaacaatccgcacatacaaacttcttttggtcggcccgtgatccatctcacttggctcatttgccttttggcgcagtaccagtctctcctgtcgccggattcaccccgcccaatacacacattacattctacagtaattgccagcttctgtcatttgggatcatggatcaacagagtcaatctgggcctcaaggccccggtggccgcaagttccatattgctcatcggagaagtccatctgagctcaccccgttgatgagtatgtgaccgctctcgtgaccgcttactatataaccattcgtcccatcatatcagctaacttgagcttgtctacagtggaacaactggccatccaacaacagatcgagttgctccagcagcagcagcaacaaattgctgcgacacatcaacaatacgttaacatggggctgttgcagccccagcaactaggccaggtgccctcgtttcaacccggtgcctccatgggcggtgtctccccacagcaagtgaatgcattccaattcccacaggggggacagcagcagcagcttggagtaccaatgaacgtaccgaaccagcattcgcaccgtcgcaaccagtctgctctccctggtcttcccatgggcccacctcctgccccgtcttccggagcgtcgggatacgccgattataaccagcagggccaaaacaacaataaccacaagaatgagaacgccggtcgcggtcgtggaggccctcccggcggtggtcaccagcgccgccactcgcttgctcttcctgaggccaagaaagccgccgagctggcccagcagaagagaacagcttcgggattccagttcccagctcctgctcctggtgcaggtagttctgataaccagtcttcatcggatgacaagcctgtatccacttccccggccccccagggacccgccttccagcgggccggaaatatgcgagctggtggtcatggccgcagccaatcgatggccatcggtggtaaccgggctgccatttccggtcgcggtgcaggcgggttccaattcccccaggccagtgagccagtaaccaatcaatctgataatcaacgacgacccagccagaacggcggccatgcccggtcatcctcgcgaaacttcgagggtaactggcgccagcccaacaaccaaaatcagagccaggatcagcagagacccatcggtcagcagcagggtggattccagcccggtcaccgctcgcgcggctcgatgaaccagtccatgggctctattggtcaattccagtatggcggccagccccagcttggccagcctcagcttatccaacttcctcagggccaagtcatgatggcacctcagatgttcggtaatcagcaactgaaccccctccagctggctcagctccaagcgcttcagcagaacgcccaaagtatgggtggtctccaggcgagccagcatgccccgccgcagatgtctgttcaacagcagcagcaacagcagcggaagactcttttcactccttacctcccccaggcaaacctgcctgcactccttagcaatggacaattggtcgctggtgttttgcgcgtcaacaaaaagaatcgttccgacgcttatgtgaccaccgacgatctggatgccgacatcttcatttgcggtagcaaagatcggaaccgcgcccttgagggtgactatgtcgcaatcgagcttctcgatgtcgacgaggtgtggggtcagaagaaagaaaaggaagaaaagaagaagcgcaaggatatcaccgacgcccggtctaacagtactgctggaaatgataagcttggtcgctctgattctgccggcgatagacaggaaattggcccggatggaagcatccgtcgccgtggtagtcttcgccagcgtccgacccagaagaagaatgacgatgtcgaggtcgagggtcagagccttcttctttgtgaggaggacgagatcagcgacgagcagaagcctttgtacgccggtcatgttgttgcggtcattgagcgtgttgcgggccagatgttctcaggaaccctaggtctcttgcgtcccagcagccaggctacaaaggagaagcaggaggccgagcggcaagccagagatggcgctcatggccgttcccacaatgatcgtcaccaggataagccaaagattgtctggtttaagcctactgacaagcgtgttccacttattgccatccccacagagcaagcacctcgggacttcgttgagaagcaccaggattacgccaaccgaatctttgttgcttctatcaagaggtggcctattacctctctgcaccccttcggtactctcgttgagcagcttggggagatgggtgacttgcgggttgagacagatgccctgctccgcgacaacaacttcggttcggatgatttctccgatgctgtgctgaagagcatcggctgggaggactggtccgtctctagcgagggagacgcccttgcttcgcgacgtgacttccgtgaagagaccatctttacgattgaccccgccgacagcaagtccctcgaggatgcgttccatgtgaagagccttgccgatggcaaggtcgagatcggtgttcacgtggccgatattgctcacttcgtcaagggtaattccctagtagaccgtgaggccaagaagcgtgggactgcagtctatctagtcgatcggatcatgaacatgctgcctacccgtgtttccactgaactttgttccctcgtccctggcgaagatcgcctcacggtcagtgtggtcttcaaggccaaccccaccactggtgtggtggatgaggatgtctggatcggcaagggtgtcatcaagagtgctggccgtcttgactacgaccaagtcaatgcacttgttcaggacaagtctgatgtcaacaccagtggcatctctgccgacagcatccgcttgttgcatgtaagttttttctgattctaccattcttcttattttcccccatgctaatagtaacactcagaacattgtcgccaagttccgcgaagcccgcttcggtaaccgcgtatcaaacgttcctgtgcagcgtctgcttcagcagctcgatgacgagaatgtgccagtcgaatacaatattttcgagtcaactccagcacacgaacttgttgaggagctgagccaccaggccaacttctttgttgctcgtaagcttgtcagcgctatgccggagagagctttcttgcgtcgtcagttctcgcccaactctcgtcgccttactttgtttgttgagcggatgaatcgccttggcttcgaaatggattcaagcagcagtggcagcctccagagctctctctgcaaggtcgaagatgtggatcttcgaaaggtaagcacattttctgttctcccagtcataaatacatattaacacgtgatacagggtatggagactctcattgccaaggccatgcagcgtgccaagtactatgtcagcaatggtgctcccgatgagatgcgccagcactacatgctcaatgtaccggtttacacccacttcaccaacccctctcggcgctacgccgatatccttgtgcatcgtcaactcgaggctgtgctctccgggggtgccgtggagttcaatgacgatattgagtcactgaacaagactgcggatctttgcaacaacaagaaggactcggctctcaatgcccaagagcagagtgtgcacattgaggcgtgccgtaaaatggaccgcaaaagtcgggagattggcggtgatcttatcagcgagggcattgtactctgcgtctacgagtctgccttcgacgtccttattccggaatatggcttcgaaaagcgtgtgcactgcgaccagctgccgctcaagaaggctgaataccgcaaggacagtcgcgtactcgagctgtactgggagaagggtgttccctcgtccgcatatattcccgaggacgagcgtcccaagcccggcaactcccgcgctgctcaagccgcagcggctgcccgcgatgctgaagccgctagagagcgggccagagagcgtgatgaggccatgcgtaagcaaactgagaccggcacaatgtctgcggacgacgtcgatgcccttttcgatgacgacgaagatgcggatgaggtgactgaaatgacagccggtgtgtcgctcaactctgccgatcgctcgactcagagcatgccgccatcgcctacacgtaacggccaccaccagcaggcacctcaccgtactcgctcggatcccaagattgcctccggaactggtgatgcacccgagaacaaattgaccaacaaagagaagtacttgaacctgttcaagctgcgcgaggtggatggagagttcatccaggatgtcacagagatgacccgtgttcccatcatcttgaagactgacctgagcaagagtcctccgtaagtgttcccattcagcttttttctttttctagcatgggcgtccctaactaacttatttctattccagatgcctcactgttcgatctgtcaacccctacgccctgtagaggtctgaacgcggctcttttttcttcatgggatatatttcttgcatgccaccctgcagattcttcgctcaagcgaaggatgctgtgtttcgtgcacgcctacggacataatccaatcccgacgcggatcgaacatatcattatcggcatatctttccttggtcttttctcggcggtttcatccaattatcccaaattctacccatcatctttctgacgtgtcctgggattcttataattatcctgttatatgtgcaaagcggttgtttgtctttttttgagcattttagttgagactgggcaaatccgttagtgccagaccttgcctggttttctttgttctcgttctctgagaatgtttaggaacttagcaggaaggacatcacagctcgatagtctcggaaaacctttccattaatctatggtattacaaactcataaccatcatcctgggctcttcttctgcgtacaatttagtctttgttataaagttgcctatgacttccaaggttgatttgcggtaagcctactgatatggtgatgaaaatatcgaaaagattgatccatggatgtcatgtgaattattgaacaaactcctaaacaaaaaaatcagacgaatatgttgtccaagccaaggcaaattgtaaagcccagggccaccttgcccagcctgatattgccaatgcaatgtaatggaaccagctccataaagttcttctcgctccttgctccatgcagtttgtaagtccgattgaattcagaccatcaagggtatcaagaaatgtcgctaacggggtaggtagatagagggagaacaaaaataaagaatcaactcaaaacaaatccaaagtagagttatcgagatgaatcggaggtctcaaagcaacgcaagaagaatccaccaatgtcaaatcaagttccagttcaggaaaatggatggatttcttatagccgacggataccaatgcgcggctttgttctgacggcaaggcgcctgtgtgtgccgctcgtggcttttttcttggagattccagaagaggaggaccctgagagagatgacgacgatgatgatagtgacggcgtaggtagttgggcatgtgctagagaaaggggagtagagccattgggcgtcttcatggggtgatattcacgcttctctttcagcccacgcgcagttgcagatccacggttttcttttccatccccgctcagcctgcgtagagggtctggcatggccaattggggcaaatcttcgaatattggcacctcatcgcggagacggccggaggcgttgactcccccacagagcatggagagcttgggtgttttccggagtggtgatgaagtacgggaacgtgtgtttgcagtgatgtttcgttcgttggagctcatggcgggggcatcgttgtcgttgtccgagtctatgagcatcatgtctgcatcggagtcttccgggtagggaattgagaggacggagagggggcgttttcccagagcggttttacggggacttgggggcgcaaagtagacaggcgaaggggaaagagttgggttgttttctttgcttgcggtagcggggtcgtcgctgtcgctgtcgctcgtggcgttgtctgttatgggtggtgagggttgggcaaaaggatttgaggaggattgtggagaatatgaggactgtgacgggttttcaaatgcagtggtgttgcgcgtggttttcttcgttgcagctgtgtgggtacgggcgtgtttccgccggcgttgaatgattgcgtcttcttctttctcttcaagtgtggtgcctgcctcctcgccccggagctttgcttctgtcactgcagctttgaggttgagtgggatcggggcgtgaattgaggtcatgagcttggcttggtgtgcaaaggcggcatagttctcctgcataagagcgcctgcggaagcgttgagggcagagtcagggttagggtagataagcagacatgagattgtctgaatagagataaggttagttatctggagaaattcattctactgatgcagttcaacttacgaccaatacatcgcgcagagttagattaggctgccaatcccgcttgagcgtatctacacagacagctccggtgagctcctccatgttcgggtgccatattttcgtcttgaaggtggcctttggggggctcttgggatagtcatcaggcatcttgagatggagctcccataatccttgtgaaaagggtgtgcccgcggggcccgtgaggagtatgttcagttgtgacaggtcatcaccatccgacggctgcaagtagtacggcggaagatcgcggtgtaaggcagcatggtcggcagctagccggcgcaagttcgacggctaggtatccatgtcagatatagagtacgagcatacaccggttgctgggaaaccagtgtgtcaatggttgaacagggacaacttaccatgctggagctttggatggtttgtggggtattaagatacagggtaacttaagttggagaagaatgcaaattcagaaagtgatccggaccagtgaaagcacaaggatcacaatcacaatgataagagatggttacttcgtcgacggtttgttttgagtggaggtcacactaaccttttcggtagcgcgtcagtcacgtgatgattgtcgcgtaatgtgcgcgtaactaatattacccttttgggattgccctatgttccaccacgtccttactatagcccttgctatctgacgagacatatatcagaagttaggaataaaggggtaaggttatgagggtgatatctcctttatttcttcctttgaagcactctcatcaaagccccgcatgatcgatggatatctcagatccatagaggcaatcatggcaaacaggctggcaaatgtctaccgactgataaaacatacaggagttatgaagccaaaaagcgttgtatgtactcgttaatacgactgacttagtatgttgtagcttgtcatacgcaatgaagatttttgttactgcaaatataagccagcgagctgttgttgaccttatcaaacctacaggtatgatctctagacttaatacacatgatcacacaaggaatcaaaactcttatttacccaggaatgcattaagtttatcacaaatatagtaaaaagaagtgggaaacagctgcgccgtgaatatgcgcctccgagtacaacgcggtgaaacacacgagtcctacccaatgagaaagaattacaggttccatagaaaacctggaaagataataacaaaccgccaaagaaaaataatcgattttcgcatgttcatgatcctcattgctgttgatccagagactggaacaacatggccgaccgacgaccacgaccaaatcctcgcctaattgagcttgatgtggacatcatagtaaaacagaagacggggtattgccagtggccaaatcacagactcttggttcgcttacaagaaagcaacgagggcagcaccggcaaccatgagaccgacagggccggcggtggcaatagcagcagcaccggtagaggaagcagtagcgctagcacttgcactggaagcactagcactggcgctggaagcattggcactggcgctggaagcgttagcctccgcgctagtagcactggcaccagcgctggaggcactagcatccgcgctggaagcattggaatctgcgctggaagctttagcagacaagctggaagagctggaagaatccgccgcggcgtccgaggaagtgctagtggaggtaacagtggccttggactctgtgacgaaggtagtggtgccagtaccagtgccggtggtgacagtggtttgagtggctccggggccggcgacgggcgaggtcagaccggcagggatggaggcggcggcctcctgtgaggtctcggcagcggcctggctggtgataacactgggttgggaagtgacaacactaggttggccggtcacgacgccgagagagtttgtctgggtcaggtagtcaacagtctgttaaataggttagcttatttcattcgggcattgtgatctgtttttttgtttccgcttacctcggtggtgacactgctctgggcgttggccagggcgatggccgagagggtggtgaagacgatggagaaacgcattttgatggattagagattattggtagatgaaatgatgtatgcgtagtgagtatggagaatgttgagggagagaaataaatgtgatcttagacaaaggctggggggaggtgggattataaggctggggttgtcccgggaaacaagtcgcatgttatagactgtttagtgcacacacatgttagaccccgaaatggcttttgaaatggatacctccagtcagccatcgccgtctgaatctagcgcaatttgagatctgcaaggtcttacagttctatttatgtcgatctctggggtcacaccaatccgtaagctcccccacgttcatttattacatgtatgtatttgagggtggagttatgagagacattcacctttacaatggtactggcatggataattaacagcaaatcactatgaaatgtgtctctctgtctcttgaaatcaaggtagaataataatagtgggaatagttggcagatttgacatggtggcaatatgcaccaggcctagctaatttagtgtcggatcacctgtacggtaagtaatcataacaaacatagccttggcgataataacgacatgtctcaatctcagccgagttaattattcagtagcgtggaagcttacttgccatggaagttaggagagacatatcattgactgtgtggacatacgagtccggtcagttcttgattgcggagcgaagcgaagcgattattctcccatctgactcactatacatagtagactaaacatactgtactccgtacagagtattaatatttttggggcttcaaatggcgcgattctattttggagctaaggagctcgaaccagccttctaagtgagacatcactttatcgaaacaggtatcccgaggtcagctctctatcctttcttctactatacacttggcattacggtatcactaaattatccttgtatgctgtaaggatataaccagttttgaggtctaatttatggattctacccacgtagtaattattccgtacactaattatctcgactttaggacttttgcctcacaaccagcccgcggactcttcaaatcaccagactaaggtgggtctttgagacaagtcagcggctcggttaaacccatccagtagggatctgtatatttatatcttttttctcttttgacaggaacaataacagattcctgcaatatcaacggggacaaagagggtcggcatatgctcccatcgtgcatggggtttaagcttgatcccagagcactgcagacggtctttattctggctaggtggataggtagtactattgacgtgcatattgtgtgactaggtcgtaccatatgtctacaatatagaagacaatacgggtataccttggtctcgacttgccttctactcatcaccagatgattctctagttataccgggccaagcatccgactctggaataaggttgcttttggctaccgtataggcgacatcaaaccccttgcttattgccctagtcacgccaatattagtggaggccatgctgtcagttgatggcctagactatgcatcgccatcctacagcggtgtggcgcgggaatgcgaaccgagtgcgccaaaagcgtctatatctggcaatgatcccacttacccaggtcacaagcagccgggcaggcgtactagtagtggaatgtttgtgcgacctctcggtcgcctctagagtacggagtatatcacacgaagatgcaagttgccacccctgcatcgccggcacatgccatacgttattctccaacttgccaagagcacaaagccattggttccaaatatcgtagccagcaacaagctgaagatctcaattgaagactgaactccctcgccgcaatgcatattatacagctctcccccactgcagcacataatcggaaactcaatattcaaccatcactccttgatcgacacatcctgaccgcggacccagtccgcaaactcctttcgcttggcctatgttatccaaatgttagcttcgaatattccaggcccgaaacaatgctgtccagcaacaaattcatatcttgaatgaatccaaatccagtagttccaaggcatgtatccaagtagatccaaaaactcacccgaatatcccagaatccgtaacgctcctccagactcaggtacgggttgcgcgctccgccgttccgttcaatctcgcccgcccactcgcgccagctaatcggcttcaacttctgcgcgctcaagaccagtccgattgaaacaattaataccgaaacgagggtttcgatgatgatgtcttgtgggagggcagtggacgtgaggctgctgtaaaggacagtatgttcgtgggccgagtagcctctgcagaagggtttgttagctttgctcaaggagtgtatataattgctgagtggatggtcggagaacgtacgcatgaactatcaggacgaggccgaagaaagtcaccacgcgggagaggaagctcatgatgggtggtgagtttggttttgcgttgcgggttggaggtcagtggttgagcccagttgctgtgaactcttcttatcgatggataattccagataaataccactgtattattggtgttgagatgaagcctggggtgactggctgtagacagtgttgtgatgccgttttgatacgttggcgttggcgggaggttcgtggaggcccgctccaggtggtttacctaatcaacttttgactccaagtggctcggatttatcatatctgttgcatttttcatactgctattgaagatgtttaatggatcggggtcttctctggttaataaggaggtgtatctccctcactacctacatatgcagtgaacgttgtattcattccttgcgatatcaacccgaaactagacctcgggacaaccctatcaaaacagacatactagactcaattgatgaaataaaccggtgtatttggctgaagctcaggcctattcccttatatgtttcctttcggttaattctgcaatgcatgggcaacacttactagaccagccctgaacgagggtaacactattcgactctgctgtccaatctctgtggttgacaaaggactttgctttgtctcgaacctccgttggtggtagccatacagatagaaaatatggtttacaagagagaggggaaacacgtagttagaccttgtaggctttgccggtctggaactagaaatatgaggattgaggctctctgaattacacggtccatgctatccacggtataattagctgtcaatagaataagccgtgagacagaacataaggagcatattccccatgtatccatcttttagttttctataggaatctgctatgggtggtgggaatatatatcgagatatcatctattacataccatttgaattagatagccaatcatgtctgttcagacgtgctttcaaatcattataaagcttgcctttatcaacacagaagacataaatacatgtaggagtcctcgtctttctaacgtggcagttgtccataagaaaagaataaggagacagcgacgtcaaagaaaaacaagtagttagttaattgaccaagttaggtgaatgtgatcgagtccatgagaatattgatcggttagaagctatatatatcttgagggttgatttgtgagacatcgagtgcataaaaagccgagcagttaccacccctgtaaatagggattctggggacttgatttgaacaattactgtctgacaatcatacacctataaatagcaagttacagtgaaactgtgaatggtcatgaattttttgaatttttcatcaatgactggtcactatggaccagctttctagttggactaggttcgtaaaggattcctttgacatcacgcatttccgtcacacaattcctgcttcataaatgggcatcgcaaatttacagcttctgcatggcagcgatatcggtggactggacgtggtcctcatcctcctcaatcttctgctggagctcatcggtggagaccttatcgtcctcaacgacaaggttgatctggagcttcctgataccgaagccgacgggaacccacttggaggcaccccagacgaggccgtcctgttcaatggcgcggacgttggcctccatctcctcaaggttggtctcatcatctggaaatgtttgttagcacttgaactggaaaagacttgaaaaatacataccccaaggcttgacctccatggtaacgatagacttggcggcgggcttgactttgccggccttcttggccttgtattcttcgagacgcttgttgcgctcagcaacgacctcggggtcctcctcctcagagtcggagccgaagagatcctcatcgtcatcctcctcctcgggcttgtccttggggttggagggaagagtggtggtctcgggaccgtagacagtgaaagctgcgttggagtcaccggggagggtggggaattcgggctcgaaagaggcaatgtgcttgtgccagcgggcaacgttggggtacttggcagcgtcaggagcggcggggaaggccttgaaggtcacgacatcggcctggctgggcgcgtggctgatgaacagagtcagcattgatgttcacatcaaatgaaacgattcaataatgtagcatagtaaagcaggatcagaggtgcgattgctcgcgattggttgtagtcatccagcggggtcttaatccgcctcctaaacacggaccaatgtttctcatcatgaaagcataacaggaaaggaaagagaggagaaaaaaggcagcgaaaatggaaggaattcatacccaacaatgtaggaccgagtggacaggaagtggtcggccactgaggggcacagtcagtcaccaattgattcgaaataacaaaatctcaggggcgcctacgagtcaggccggcatcagagacaaagtcggtgaaacccattgtgaagagaggtgtgttggtatctggaaggagaagaaaaaaaggagaggaaaatagatgaaggaggggttaaaaaggaagggattttttttgttacggaaaatctcttacggagtcacggaaaaacgtgaaagagcgaagactggtcaggtgacttacttgcgacagtgcttacctacacaagtcatgtgaccaactggtgacttcaggacgaagcttagactagtcaggtgactgactggtgacggaggtctggttccttccgccactcagcgtgtactatgtggatcgttcgagaagcctcccgatggaccttggttatcggtatttaaggtataacagtgacatgtccgatcctgaactaccctaggtttctttttacacttttttttttggcaaatctataatattcattatggcggcgagattatccctcaatgcccgcagtcggcttctgcgaacgcctcgcctatcttcgacccggcttctatccccaatcccgagatcaagcatactaccctgcacctctatcataccaccagccatcaaccatagccctatatctgtccgcaactatgccaacgggggccgtccacaccctccaggcggtactcaccgtatggatatgagcggcggagaggacgagaaatcagcactagaaaagtatggtgttgagcttacggagaaagctaaagctggcaagctggatccagtcattggacgggatgccgagattcatcgaaccatccaaattctgtccaggcgaactaagaacaaccccgtactgatcggttccgctggaaccggtaagaccgccgttctcgaagggctggctcagcgtatcgtacaaggagatgtccccgagagcatcaaaaacaaacgggttgtctcattggacctgggctctctaattgcaggagccaagttccggggtgacttcgaggagcgtctgaaagccgtcctgaaggaagtggaggatgcagaaggcggggtgatcctcttcattgacgagcttcacaccttgctgggacttggcaaggctgagggcagcattgatgctagtaatctcctcaagcctgctttgtcgcgaggcgagcttcaatgctgtggtgccactactctcaatgaatatcgattgattgaaaaagatgtggctcttgcccgacggttccagcctattctggtgagtgagccgtcggttgcctcgactatttccattctacggggcatcaagaacaaatacgaagtacatcatggtgtcagaattacagatggcgctttagtagctgcagccacttacagtaatcgctacatcaccgatcgattcctgcccgacaaagcgattgatcttgtcgatgaagctgcatcggctcttcgcttgcaacaggagtcgaaacccgactcgattcgggaacttgaacgtgacattactaccatccaaattgagcttgagtctcttcgcaaggaaaccgatgttgccagccgcgaacggcgagagaagcttcaagaagacctgaagaccaagcaagcggaggccagtaaattgaccgaggcctgggaagaggagaaggccgaaattgataccatcaaacgcaccaaggagaatttagaacgcgctcggtttgaacttgaacaagctcaacgcgaaggaaactttgccaaggctggagaattgagatactctaccatcccagagctcgaagccaagctacccaaagaaggcgctgaacaggatcctcataatcaaactctgattcacgactcagttactgcagatgacattggaaacgtcgtttctcggaccacaggcatccccgttaacaagctcatggctggagacgtggagaagttgattcatatggaggacactctccgaaaatcagtccgcggacaagatgaagcgctttctgctgtggcaaatgctgtgcggatgcagagagctggtctcagcggagaaaatcgccctatggcctctttcatgttccttggtcccaccggtgttggaaagactgagctctgcaagaagatggccgagttccttttctccacggaaactgcagttttacggtttgacatgagtgaattccaggagaagcacacaatcagtcgactcattggttctcctgccggatatgttggatatgatgatgctggtcagctcaccgaggctgtcagacggaagccttacgctgttctgctatttgatgaattcgagaaggctcatcgtgatatctcagcgctcctgctgcaggtcctcgatgagggcttcctgacagatgcgcaaggccacaaggttgatttccgaaacaccctgattgtgttgacctcgaatcttggagctagtatcctggtcggagcagaccccttgtacccaattaaagatgacgccggtgatgccgagcttccagaaaaggtcaaatcggctgttatggatgtggttcagagcgcatacccacctgagttcatgaaccgaatcgatgaattcatcatcttcagacgcctgtcccaggatgctctccgggacatcgtcgatatcagaatcaaagagcttcaggctagactcgatgaccgccgtatgactctacaggttgacaatgagactaaggactggctgtgcgagaaaggctacgaccccaaatttggtgcccggcctttgaaccgtctcattgctaaggagattggaaaccgcttggctgataagatcatccgaggtgaaattgtctctggtcaaactgcccgagtttctcttgatgagtctaagtctggccttgtggtaactgcggagaccgcggaagaataaatgacaacatgaaatctagcgttcttatgtggcacatacaatgtttttgcatctgctttttttgcgaatatttcgattgcatgtccggtcttctctcatatattatggctttgtacaatagtctattctagacaattcatattcatcaagttgcttattttatgtaggctgtaggctcgaggaacgacccgtggacaggtgactaggccaactcccaccgtttcacatccccatcattttcctctctcatcccatctctaagtatcccaattccgtgggccgcgggaaaatgccttcattaaaaagaaagagaacaccagcttcccggcatccaattacacctcgtacatctgggcgacgactgggccacagggcgccagctagtcaagccttcagcatttcaagtggtcctccccgaacccctatcatttcatcagcaagtcaattgcacacaccttttcctacagataccaagatcgaaataggtgggtcggtaagagctacagatgatgacttcgatgaccatgtcattgctgccatcgacatgaaggatcatggaactgtggggtgctcatactactcagccgaagaagaaaagatgtatctgctaggtgacagtcggtcgggggatatagagacaatcgacgctcgtgggttaattatttgttcaagtctagattagaagtgctaatcaggccatctacagtgcttctccagataaaacctacagtggtcttgacacctccgcgggttgatcttagttcccagaatcaagatccgaaccttgcacaagaagatggtacatttcccttgcactggaacaatttgaccctttccagtgcgggcaaatgctgataatttctgtctagtttcttctgcctaccttccttaccagatagacattcgtccaacttcggagttcagctactccaatgcagaaagcaaacttcttgctttaggggtttcctctgcgcacgaacaaggcctccggtttttcgtgccccaaaatggtcttgccggaccggaagaagtggacccagaagagatgggcttcacactccaagaaggaagactgctgcatatctcaagttccgttgacatggataaccccgtgactattggttgcgcgggagccatactcacttacctgcagcgacgaagagccgcggcacctagccccctcgaagaagggaatgagtatcgggttcgagcactgcagatgttcaatctacgggatacgatgtggatcaacagcaatactttcacctctctccagattatccagtcggagtcacacccgaatatgttcaaccagggacctgggaaaaagtctgcttcaggcaaagagggtctttcggtctatgggctcttccaacactttgcatacacgcctcagggtagggcaagactcaagcagacatttttccgtccaagcgtgaatctagatgcgattcgtgaacgacacgatttcataggactattctcccgccctgacaatcttgcttcgttggagaagatgaccaaagcattgaaacacattaaaaacatcagacctatcatgctcaatcttcgcaagggaattagtactggcagtgctaaggttactgggttcaaaactacggtttgggctactcttcttgctgtatgtttgatttgccatcatttgtctatgtagagtgatagttcttcattgcgatactaatgaggcgactgaccagtttgcgttctacgctatcgacatcaatgatgcactgcgggagacctcgggcgcgcacatcctgactgtccgaagcaaggttaatctccaataggtatcccagtccttcttgtattgacaacttgcaggctctcagggtctttgaagcagcccagctgtacagagttggtcgtatgattcaagaaattgtaagttccctttttaatagaattaataacgcatctgactttttaggtcgacattgataactccgaagaacaaggaagaacggtggtgaagcaaggaattgatagagagcttgacagaattaaagacagatacgatggtctcaacagccttctcaagcacgttgctctcgacattgccgcaacgattccggcgactctcgacgtcgacgtcaatgtcatttactttcctcagcttgggttccatgttgccattccactcaatgagcatggtgctgcggcgtatactagtgctgatgatgaatgggaattaatgttcatcacggaaaatcgggcgtatttcaaagacttccgcatgagagagatggatcagaagttgggagatatatacggtattatctgtggtaagcctgctaaattaatgggaagcaatggggatgaaaagctaaaaaaaaaaccctaccttgacagagaaggaaatcgagattgtatacgacttagcgcagagggttcttcgatatgagaatgtgctcgtcgatgcctctgatatttgtggagagattgataggttagtctttgtgggacatgatgtgaggtccgctgatacaaatttcacagccttcttgctctcacacagggagcaagcttctataatctgaccagaccacgaatcgttgaacaaaatgtgctcagaatcaagggtggccggtaagagctcttcaacgatcatccctcgacatctctgacagatgataggcacattcttcaagaattgaccgttccgtcctatgtgccaaatgacacattgctgatgggcggaaatgagtccgagaccaatgacgctgtttcatccataaattccaatcccagcatgttgctcttgactggaccgaattactcaggaaaaagtatctatatgaagcaggtaagctgaattttgtctttgtgaaacacattttctgacctactattaggtcgctctgattgtctacctagcccagattgggaggtatgttcctttctattaagataataatacaaaggctaactggcacagctttgtccccgcagacagcgcggaattggggattacagacaaaatcttgactaagatcaatactcaagagagtgtctccaaggtatctcaaatcctttgtataaagtgtcggattgggcaacctaacatgtctcaaggccgaaagcacatttatgaacgatttgcagcaaatctccctctgcctgaaacaagttacgaaccgaagcttgctcatcatcgatgagttcgggacgggaactaccgaaagcagtccgttcctatctagccatagcttttcgttcagactaattaacgcgtttagatggcatcggccttgcctgtggcatactcgattatctactgtgcctcgagaggccccctaaagtcattgcagcaactcattttcatgagattttcgagaacaacttcctcgctttgcggcctcgactctatcttggctatatggaagttcaagtttgcgaagaaacccaggcagccgaggaccagattacatatctgtataagtatgtacaggaatgctggctcctgggtcaatggtatgtaaatgatgcttacagttcgaacagttttcgtccggggcgaagtagccagagctttggtaccatgtacgtcctgcttcttatcatgtccgcattcctttcgaatcgattgacttcaatattggtataggtgcgcggcaatgaacggtatcgacccatctgttatatctcgcgcaaatgagtttacgtctctttccgcacgaggggagaacattattgtggcctgttcggttctatcttcagaggagatgcaagacctagaagaagcggtacgagttaacttttttataaaagaaaaatggaatgtgactaacaacctcgatacaagaactccctagtgagacattttctggagattgatttctcacaaggtgactcagaccatgtcaaggccgtcttcgaaggcctgttcgagtgaaaggatttattagtatggggccaagcgcatggaggccaatgatatcacgaatatctttacaaagtacaacatatatttacgccctaggtcatcatcaattagctgaacccgcgatgtcgatatattccattaggagaatgaaatccttgcccaccttcactgcattcgtagcaatcggggagatagtagctaggatccctgatggatcaagcacattatatacgtataagagaagatggattgagatgaataaaacggtttttgaaacttcgggtaaaccagaagatgagatcggggttatataactacacatcgaatgcctgaaactgcccgcagtgaacgccatggaaacatacacacaagaccgtggattttatgatcaagcacacattcacagcttaacactcttgaccaggtttttcttgatacccgtaagctcaccaccatatccaccgcggccctcgccgcccttgtacagttgcttagtactgccaagcttcttcttcttttcctcgtacttctttctcttcttaacacgcgggttacgcgagtctttactgcgtttcgcgtgcagacccttgttcttctggatctgatacgtgattgcacgcttgccatctggaccaacctcctcttgcacaaagatttttccaccaaggcgctcagcctcagcgtaggcatctgcacgagcctgcttgtcgtccttgcgcttcttggagcgagatgccaccatgtcgtagtattcatcgtcatcagtgccctccttggcaccctcaccgcggcggagctccttggcgacgcgacgatcctcgtcgtcactgtcaccgcccagctgctggtcggggttgagttctttgcggccgcgcttctcggcttccacattgagacgggcttgacggtcacgcagacgttcgcggtatgggagatcggcgtctccaccagcatctcggcctgctgcgttacgtttgttggctttctgggccagttgcgaggtgtagaaacggagcgagcgcttctgcttggccttctcttctgcctcatgggctgtgagggcatcctcatcaccgaagtcagagtcatcatccttgagaggtgccttgatcttttgtgtcttgcgcttccgtgaaggctcggtggccaaattctcgagatcggcgaggccagcttctgtttggcggagacgctcggcgcgaagagcttcggcttctgcctgtgctatctcggccttgctgagcttcttctgtttcggcttcttgatctcttgggtctttggttgcttctcggtcttggttttctcggtcttagtctccttgataggctccccaacgggttcctcaagctcctcgagatccttgacagtgttccaaagcttccggaatttgacaagcgatcccatgacagggtgttgtcggagttcggcaggggtcatcggaacatgctcgctagtcgcgtcgggagatggggaggaaaggagcatgaaatacatgctgatcgtgccaaggtatgcagacaacgcacggaatttcaccacaggcactggggatggctgtggctcttctgagtcgtcgtctgttgaggaagccttcaaggctgcttgttgaagatctttgaaggagctttgaaggtccacgaagtccttcgctaggggttcaaactcggggtatctcgacttcaaaattttcagcttctcatcggtgtccatatcatcagtgatctccaattgtggaagcacttcagttaccacgccagcgtcggcgccgtcctcggtacccttgccggattccacccattcagactcgtcaaacccgaaatcggcctcattcatagcctgcaactgcttcatttgtagtcgcttggcctcctgctcttcctccaatgcatcaacctcggtctcgatctgatctgcgttataaagatcctttttcgatgaaccccaggcagcaatgccttcttcatcttcctcggattctgcatcacccttctttggctgacccatatcatcatattcgtcgtcttcttctgagtcttcgagatcgtcatcctcgtctatggattcgtagccaaggatttcttcgtctgaaggctggatcaattcctctgtgacaatcagtaagacaccgttcgcacaagctcagtttatcctcaaaggcacataccctcctcggcaactctgcgccgtctcttcgcctctgggccttcctcgagtagaatctggtcgcggccggtttggaagtcatcttccgagtcgtcgaatcgctcttcgatgtcaaacttagagggctcaggagctttgttctccgctggacgaccagcttttctctttttgctgcccatttttgcgtgtataattcaagcgacaatgagccaactcgaagtctggccgataaactgtgataaaattattttttgatccctcaccgccttggctgcgctagcctcgagtggggcgtttgctctgtttgcacctttggaaatcaaaatacgggtaattttacaatcccacaacttttgtaccgtcaaaaacagacatcgggaacgatctcgggtatttccgtatcgttacacaattatttactgccccgtgtgccttccatttcgaggacaactgacagacgcaactgccaatcagccacgatggatcctcacgcgttaattgctcgtcttcatctgcctcaacttctctcctccttacagtccttgtataataatacgtccaccctgatattaggcgtttccacactcttttgcactatcattgtctatactattgccaaaatgtttggttacgggctacgaaatgagttcaatgtcgacgggcaggtatgtgtaagactacatgattaacgcggtacgttctgactaggtatgacagacagtgttaataaccggtggctccgatggtatgggcaaagctgtcgcactcgagctagctgcgaaaggcgcaaacgttgttgtggttgcgcgcactgtctccaagctggtgaccgccgtcgatgagatgaaggtcggacatcccttcataatcagttgatcaatatagctcacctattatccaggccaaagcagcgaatatctttaagcagaaattcctctatatcagcgctgatctctctgatcccgtcgagagtgaaagagtcctcgcagaagtcacaacgtggaattcaggggctgctcccgacattgtttggtgctgtgcgggcttatctcgcccgggattctttgtcgatgtgcccatccaagagcaccggcagcaaatggatgcagtctattggactgcggccaacacagcacatgccaccctgcgccgctggctgaagcccgttgccccgagtgaacagatgagaacaccccggagacatctcatttttacctgttctacccttgcattcgttcctatcgctggctattcgccatactcgcctgccaaggcagccattcgttctctatccgatactctgagccaggaaatcgaaatgtacaacggagcctatacccagcggcaccgcaatgacgccccagctgcggatgtcaggatccacaccattttccccatgggcatcctctcacccggctttgacaacgagcaaaagaccaagcctgaattgaccaagaaactcgaagaagccgacaagccccagacgccattggaggttgcaaagatctctatcagtgccctggagcgcggggagtacctgatcactaccaattttgttggtgccattatgaaaggcactgcctttgggcctagcccgaagaatagcattgtcggtgacaccatgctcagctggctcagcaacctagtattcctccaggtcattccggaccttcgcagcaaggcgttcacttggggaaagcagaacggggttccgaacggtaacagtgctccggcttcatagcgatcgggtgtattcttctagcgactgcttcttgtatgatgataccatgagcgatgtctgcatggcgcctccgaacacctaaacattcttcaattcctttcatcctttgttgcatattctttactgtacagtacaaaataatggcttgtctgttctcgtatttgtagcaattcgaacctttcattgatgtagtcattttccggggcccggactgatgacgtacgatgtagaaacaacaagcttatcgtttatcctgccaccccattttcgacctcgaaatttctttgtccccaattgcactgcccaaactggggtttaaaaagtctttgtttcaaatatgaatggcaactgatcacagatcactatttttggcacaaaaagaaattgctgggaaagcagaaacaaaaccctcgctcctccatcgaaagactcggcgatagcgatagcacaagatacaagcaaaccaccctcgagtctttcaacactgttaacagcaatcgccgcgcaaactcgtgtcaagatggaggctctcttctcaataccggtgctgtccgttttcctcattccggtcctgtcatcctacagcaccagcctgaacctcctgttcttctacatgacttggtcaacactggtactgtcgcattcccggctccgcgtggaactgttcgggacgatcgccgtgcgcgtactcttctacgcactgccgtctattgtcttcttcctctttgacatcctgaccccgtcggctgcgatcctcatcaaggcgcaaggcgcaaccggcttgccaggtgggaggaggcgacgtcgaatccacgcgaaggaattcaagatcgctgggtgggcactattcaatctattcttgggtatcgttgtgcagggaatacttgaaacgatactggttcggacgctcggcaagcgcagtgcgctcaaggtatcactgaagcttcctatgccatttgagatatgtagggatctgagcctggcgatgtttgggcgagaagtgagttattagaattcccagactatgtttctagcttgtgtcttctttggtagtcccatttgctgacattctcattctgcttttgatagctcctcacatatatcattcaccgctacgctcttcactcagggagatctcctatactttccaactggcaccggtcttggtaccattcattggctgctccgttcccattgaccgcgcattacgaccacccggctgtctatctagttaacaagttcatccccacctatgcaccagccatcatcttccgcttccatatgcttacatatcttttgtacctgctgttgatttctgtcgaggagaccttcgcatactctggatatactgtcatgccgacaaacttatttttgggtgggattgcccgtcgcacagatatgcatttgttgatgggtggaaggggcaactatggcccatggggtgttatggattggattatgggtactgttgttggagactcgcaaaccaccgacgatgagagttatgaggcagcagatgagccggatatgcggaaagcgtatgaggctgcgaagcgaaaggctgttgggtctgcgacgaagccaaggcgacgatgagacgaccattgatgagtacatgataaatcattgattggagctgtagctatgtagattttgtcttggttttgctgtttttatttggagtgtaaattgggattgttcaacatatacatgtgtgtctagaactacaatatatattcgaggaagtgagacttttggatgatatgatattctttgaatgctatcatcattcataccaacattggtttcatatgacccccaaatgaatatcattcgagtactatacaatcagtagctacgagggcatggttggcacttaaccctaaaatcgagtggcggatggctgccaagagtgattacacatgggatattagatctagaacacttagaagctcatcgcacatccatattgcattgaactctacggtgatatagccgagcagctattataacatgcatccattgattatctcaaaaggtgtcaagaagatatttatatacttcttactccgtagtccacgcctagatctcgagatctctactctagttccacacaatccggatatccacattcatgacaaggcccagcaaccttatattttagtgtcttacagagattacacgacgcttagatgaatcgaaggaattgcccaattggattgccgcctgaacctggaaatgggagttggtcatactgaacataaaagagaatccagcccgcctgctggaacgaggtgacttttaatcttttttttttttcttgaagtctttcttcataacgcagcttcatgcaaaatcagccacgcgcaaaaggaacgggtttcttgaaacatgagaacgacatcgggttgtccgaagtaaccgcaaatcataagaaaagtgaaaaacgtgttttgacggatcccgtaggaattacatgacatggttcatgaaaccgacccccgaaagtcgcgaaaggatgccgatctgcaatcgagccgcccctcgttggaaaaatggtcctccccaactatctaccgaacccgcggctaccacacatttaccacttcatctcgtggggcttgtcgccgtttcggaggctgaaggtggtagcgaggtagctgccgaggaaatcctccttcttgatggaggcaaggatagcctggtcgatagccttctggtcgctggcgcgagcgctggcaacaaccttcttctgtaaagacaaaaaagtaattagcatttcatcactgcaaatgtgatagtgtagacaagatgcgtacctcagccttctcgccctgcttgaagaaagcctcttcggtcttcttctcagccttcttgtccttggtgaagtatccgggagcggaggtcttctcaatggccttggcgtcaacaccgctgatgtcgacacgcttggaggtggcaatcacgtagcgggagttcacgcgacggagagggacaccgttgatcttgaaaggaccggtgacaaggaggacaccctggtcgagggacttgaggaggatgacacgcttgccacggaaacggccagcgaggaggatcaggatggtgccgggaacgagggtctcgcggaccttggcgggacgcagggtcttgcgaacctgtaaacacacaaagtagttagtctctgatgccacacaaatcctagcgattcccgtgaatccgcaagtatctcccatcgccatagccgcatcctccccagatgatatgcgattcgcacaagatcacaagatttgatgaactgtgtcgtcgattgacaccggtgtctggctggatgtcgccccgtaattcacaaaggctcttcctcagaataccggtgccatcgtcgcaatcatcggggcggatgcgtgccgggtcgtatgtcctcctcttttttgtgccgtcccattttcacagggtgtactgactttcttgggctgcgactgatcgtccacggggtaccacttctgggccttgtcggtgggcacgaccctctggctcttcccgaactgcttcgtctggccgtccgacatgatggctgctggcgaaggatgaatggttgtcggggtggttgttggagatttgagtgaggacttggactgctaagcggagtcggctccagtgcgggaattcgtcgagggttgtgtgtaggaagccctatcacgtgtttaaccgacagccctagccacttttggaaagcggtaacttagcatgctgatgccatatctgtaaggccgcaatatacgggcgactgtaaaaccacttatgcagaagcattgctcgacacaaacaactgacgtataccgctcgcagcctctctctctctttctatactctgtcttaacatcctcccgactcttttttttatctacctggagggagcgaattctgtcaatacagtatcctctattattggatctttgttcagaatcaaattccccaacatgtcgatagctccgatcatcaccttcaaagcaggtatctgcgacctggatgtacgtgagcttagctttccggataccatcatccggatatacccatattacattgcaactttactgacagcttcaatcagatctctagcactcctcccgccgtaaagccgaagccaaccccaggctatgtctacctttactccgaagatgaccttatccacttctgctggcgctcgcgtagcgcctcactagacgagcccgagctcgacctggtgatgatcccttcagatggcagctttactccctacaagccatccggcagggacgctacgaatggccggatatttgtcctgaagttttcatctagctctcagcgatacctgttctggatgcagtcccaatcccagcacgaggacggcgacccaagttggttcagtccccgtgacttgaagcttggagaaattgtcgatgttctgctgcagggcgaggaggttgacgtagagcacgagatcgccaatcttccccgccggccttcgggcggtgatgacgatgagaccatggaggacgtggaaggcaccgatcatgatcgcaaccgataccacagcgcaggtagcggcggcgctggccccgatgcgaccggtggcgacgtgcgtgaggagggacaagagtcgcgagaaggtggtgccgatggtggacgagcgtaggtacatatctccgacagccttgattcgggccatctaagctaatttgccttttgcctcatttgcagagcaactgccgagcaagattccgcgtcggttgtccaggactttttgaagtctctgggcggccgccagagccagagcgaatcccaagatcctgaacgaccatctacgacacttcaagaactccttccgccctcgaccacgttgcaatttattgattctgctgataccactactgccgatcaccttctgagcttcttaccgcccgcactacttctactggcccagggcaacgctgaggcttcggaagctgacacggacccggaacttgcccaagctgctctcctgtccctcgacctctcccagaaaaaagatattctccgaaaagtgcttcgttctccccaattcatgcaaagcttggccagtcttactgtagcccttcgtgatggtgggcttccgagtatcagtgaggctttgcaaatccccgtggctaatggaggctttatgcggagaggtggagtaccccttggtggtggcgatgcggtagacgcgttcctggatggtgttcggcaacacgttaaagaaaaggaatctcagatggatactgattgaatcactatcaatacatttactcggagaagagaagacattcggaaacttttcaaaggtgtagaactatttttggaaaaaagggaaccccactagggagcattgttcaagcaaggctgcgtcagcgtctggttaaaaccgttgtaattttcattccaggagctggaattggaggataagccagctgttatgtaggcagaaaataataaaaatacgatgtacgatgtatatggctcgtatcctgccgcggtatgtcagccacgacaacgttgaatatccatgcgcatgccgggacttgtcaatttttagtgcaattgcgatccgaacgcccttggcccgaattcagctttggaagcctgtctcttcttttgatttgtgttggattcacactctctttatttcctatattatacatattttctcccgtcaacacgtgtcgccaccgtgtcgtgtccgataaacccccccgtccagcctgcgatgtctgcgattcggtaatatccgatcctgcctgacgatggcaccagatagccagaaccttgaaaacgacgaaaacgctccgccgaaccacatccctctccaagatctctcaaaaccggccgatgctcccaacgagcgcgggagaagccgcgcgggaaccggcctcttctcacgacgatcattgatcgggagggggtcgcggagcaattatgagagtgttgcgaaagagtctccaatcgattcggctggaccgagcaggagtccattccaaccgtcgaaaacgagctatacagaggttgcttccccgattgatgacctgggtggtttcgcgcaagcgatgtcatcgattggtctcagttttgatggccctcaatcaagggcatcgccctcgtaccaatcagaaagccgtggctttgacgatgctgcttcggaccttgacgtcgtacctctagacaatttcgatccccacgacccccatggctacaaccccccagcagacgaagatgatacagtacggttgaccgatcctcgatacttacaaccgatgagcggtgctaccagtgtagaagggcgacgcagcactgacaccggtcactccgcgaattttggtggtgcaagactgggcgatgatcttcctcacctggaggatgggatgggaagccgtcgtggcagcactgctcgggctcggtcgcgctctttgtctccatcggcgtctagcggggctctgcaacgcgccagctctatggtcaaatccatgtcgcagcgagtggtcaatctgagtaacgaaccggaagtcgtacagcaaacgattgagaggcaggagcttgataaaaatgcacgaatggatggaccgccagtcttgcccgcgatgacagactatgacaacgaccaacacactcaaccaccccgagagaagcgttcctccagcagattatggagggatcggaacagtccattcaaaggcaggtcacttggaatcctgggaccaaatcatcctctccgactctggctgtgtgatatcctagtaaacccgttcatggagcccttcatcttgattgttattgtcatccagaccatcttgttgacagttgaagatgcgcttcctaattccacgaattcagtgaggtggggaagcagcaagtttgactgggttttcttagccatttttgtcatttatacacttgagataggctctaagattttggtgtctggatttattctcaaccccgtcgagtacagcacactcaatcgcaacctcggcatcaggaaggcaatcgcagagaagggcaggaacctgatcacaccgcatcggcagccaacgatcaagaaaacatctacgctccaggctgagccccaagcttcaatcctgcgaacatttacaggaatgaacggactagaccctgaagtctttgatgatcctctacacaaacgtcgcattaggcttgcccatcgtgcgtttcttcgacactcttttaaccggcttgattttgtagccgtggtcgctttttggatatccttttttctttcaatttctggcgttgagaaatcacaccaactgtacatctttcgcatgttaagctgtctcagaattctacgtctccttgccatgactaacggcacttcggtaagtcttccgttgcgatgatgtggctttcgagatactgaccaattacttctaggtaattcttcgaagtctcaagcgagcagcccctctgcttgtccatgtctcatttcttatcggtttcttttggcttcttttcgccatcattggcatccagagtttcaaatccagtctcaggagaacttgtgtctggattgatcctgcaggccagagcaattacacgttgaatgatccatgggacacattacagttttgtggcgggtatctcaaccagacgggtggagaaatgccatggcttaactccgatggtatggacgcagggtacagccctaaaggatatctttgtcctcaaggttctgtatgcatggaaggcgtcaatccttataaggggactatgagctttgacaacatcctgcactccctggagttggtgtttgtgatcatgagttctaatacatttaccgatctgctatactataccgctgacactgactatctcgctacggctctgttctttgcctgtgggtttgtcattttgagcttgtggttggtgaacttgctggttgcggtcatcactcactcattccaagtgatccgagaagagagcaaacgcagcgcttttgctgtgcaaaaacttgatgctgtcgacgaagacgagacagtgtctcacaaagtcagtcctctaaagcgcatacatgataaaactgagtggatttggatctgcctcatcatattcgaccttatcgtgcaagcactgagaagctcggctatgtctgcccgtcgaacgcgatttattgatactactgagactgttctcactatcattttcctagtcgagattattttgcgattcgtctcggattggcgcatgtttcatcgaaggcgtcgtaacttgacagaccttttgcttgtaatcgttacctgcatcatccagctaccacctatcaggaactcaggtcgcgcatacacagttctcaccttgttccagatccttcgggtctaccgagtggtattggctttctctgtgaccagaaagctgatcgtgattgtgttccgcaatgctgtcggtctgctcaacttgatatttttcctattcttgatgacctttttatctgccattttcgctacacagctttttcgaagccagatcccagattcagatccaagtggcacgacgatcatgatcacgttttcgaatatctacaactcatttctgggaatgtatcaaattttgtcgagtgaaaattggaccacgattctttacaatgcaaccgcatacacgaccgacttcaacacagcctggatctcggcagcattcattattctttggttcattgtgtccaactttatcatcttaaacatgttcattgctgtcattcaggaaagcttcgatgtttcagaagacgaaaaacgaatgcatcaggtcagggcttttttggaacagaaacaagtccatggagcaccccaaggaaacttagcactctcgaaaatccttcgcattggccgagattccgcccgttataaagatccactcgaccatggtcctgccgcattggaaatgttgctgaaagacgccgtggtgcaagagttcctcgacgatgaagaaactaggcaacaagaacggcaaaggccgaaggactcccgaagggtgagcacgatgccactaggcgcgactcaagagactgtccaaccaggctggatctcacttctatggacgaaggccaccacacttgttatgcggagggagccaaatcctttctactcgaagctgaagttctcacgtgcttacgaggagttggatccgagaaccatggcaagagaagttgttactgcggcagagcagagaaaacgggaccagcgagcatacctcgtgaaacatcctaattataacaaatcactgtttctttttccgccggataatattgttcggaaattttgtcaacggattgtcggcccaggacgtggcagccaacgagttgagggtgtggatccatacaagccactatggtatgcattctctgctttcatttatgcagccattgttgccatggtgcttctcgcctgcattacaacacccttgtatcagcggcagtatttccgcactgaccgcaactggttcgtctatactgacttgggctttgccgttgtgtttactattgaagcaacgattaaagtgattgccgatggtttcttctggacgccgaatgcatttttccgcagttcctggggatttattgacggagtcgtgttgatcacgttgtgggtcagtgtcggtggctcgctcaaacaggactggagtgtttccagagcaatcggcgcctttaaagcgctaagggcgttgcgtcttttgaacgtcagtgacagcgccaaggacaccttccactctgtcatcattgtcgggggatggaaggtcattgctgctgctgcagtttctatgagtttcctcataccattcgcaatctatggagtcaatctgttcaacgggcagatggccagctgcaatgacggtgggttttctgggaacttgaccaactgcgtcaatgaatattccagctcgccatacaattgggacgtgcttgctccacgagtggcggggaactcttattatgacttcgacaatttcggtgactccctcttcatcctgttccaaattgtctcccaagaaggttggatcagcgtacaagaaactgcaatgagtatcactggaaagatgacccaaccacaagatctagtggcaccggagaacgggcttttcttcgtggtattcaacttacttggcgccgtgtttgttctaaccctgtttgtgtctgtgttcatgcgtaattacacggaacaaactggtgtcgccttcctgaccgccgagcaacgttcctggttggaattgcggaaacttctccgacaggtatcgccctcgaaacgatcttttgatgacgagagcaagaaattgcggctgtggtgttatcgaatttcagttaagaagcatggccggtgggcgtggttcgtgacttgcgcccttgtagttcatctactattacttgtgctggaatactatcccgaacctgcctggtgggagatgcttcgaggtaagtttttggccagactcgaatgttacatgttattaattggtcaatctagccattatattcttggcattcatgcttgtctacgttgtgaatgtcttaatccgactaattggtcttgggtggcatcgatttagccggagttcatgggatctgtactctctcatcgctgtccccggcgctttcatcagctccgtccttgacatttcataccgcgaaagaactcatgtcgtggtggagctcaacaagcttttcctcgtgtctgttgccctgctgcttatcccaaggaacaaccagcttgatcagctttttaagacagcggcagctagtctgtccgtgattggaaatcttctagctacctggttcgttctattcttagtgtttggcattgcgatgaaccaggcgtttggccttaccaagttcggcgaaaatgaggatcacaaccagaatttccgcgatgtgcccaaatccctgatcctgcttttccgagcaagttgcggagaagggtggaatgagttcatggaggactttgcgactatgactccgcccttgtgcacacaaaattccaacttcctcgatgatgactgtggaagtgcgccgtgggcccgtactcttttcattgcatggaacctgatcagcatgtacatctttgtctcgctgtttgtttcattgattttcgaaagtttctcctatgtttatcagcggagcagtggactgtacgcgatcagtcgtgatgagatccgtcggttcaagcaagcgtgggccacgtatgatccagatgggacgggctttatatccacggagcggttccctcgcctactcggtgagctctctggtgtctttgcgatgcgaatctacgagggagagttcacggttggaagtatcctggaaaaatgccgggtcgaccctcagagaaactcgataggttctttcgcaagaaattcgacggtatcgctggttcagccacgacaatcaatgtggccgaactctcgtgtctcgtctggtgtagatctcgacgagctcagtcggatcatatcgcggattccagttcaaagcatccgagagcggcgcagacgattgaatgctttctacgaagaaatccttgtgtcagcagatcccgaccgcggtatttccttccatcagtgcttgatgattctcgcacattacaatgtgattagtgatagtaagagtctgcgcctcgaggaatttctacgtcgtcgggcacggctgcagcgggtggaagaggctgtccgtcgaaacaccgtcgtcggcttctttgataccctatactggtcacgcgaattccgccgcaagattgaccgcaagaaaaacggccggttgagcattgtcccgacattcactgtgccggagatctttgtcgacaatccaggcgacgaccccgaggagcacgaccagccaggttccggtgcaatgactccacggacacaaccagacttggatgcaaacttccctcctatgctctcaccggtctccttgcaccacagacgagcggagtccagcccaactggaaaccgcagtgctctgcctcgcctcaataccaatttgagcgggtcagtatctagctgcagcacacctacgagggagtggtcgagtatcagtccttcaatcacaccgcgtcaaatgtatggggagcacaccccgctcgacaccagcgaaacacacgaggcgccttcggccaccgatacttcgcgtcatgtacaggatgttatgcattctctggacaactccgcctggggtgagagtatccggcgaagctttacacagcggcgatcaggcgatcacagttctgaatgaaatgctgtgcctattgatgtgtctgattttggatgttatcatgaagtgagtggatagagcgtggtttggttttctactcttttttctattctttagcattcccctcgaatagattggggattttgtctatgttttatggcctgtttggcccatttttctgatttttggtgctttatactactctccttagcgtgggagcattttgcatagcagcggcgtgggattccatttcaatatttttccatagacttggatacacgattgattattgcatatcggacattaaaagagacgattattccaactatctatagaagactgcatgggccaaagtgggtcggattggttactattggcgacggaggagggaatcgagaaaaagatgagatatgaccgtatatggctatgaatacatctacttttagataagtacatacctttacatatggagaatacaaaactagcaaaagaagtccagccctaaagccattgtgtatccgtttgcagggacaatcacattcatccgcatgcgttcacccgcgttcaatccgtgtcttaaccctccctgcagcaatagtccttgcagtcaacccgttataggattcagaaaaaaagtaaatacctaggacaattctctattcttcgctctacaaataaccaattcaatcctcgtatcctgctctactatgacatagtccaacaatcaaatcaaaaacttcacaaaagcctcacattccataatataacaaaagcaacaatgcacatcgcctcgccatttctctctttgagcacatctttccgctccagaagccccaaatcaggcagcgacagctcgagcccaagttcaacaacgacctcaccaccctcctctccaacgtccacccactcgccccagagctcaccacaccacctgttcaacctatccttccacacctccaaagcccagcacatattccgagggcaccccgacagtgccaggcacacaaatactagccccggaaattcagcccgcccccgcccggcctccgacggcccacacaattccaacgccgtcagcgtgctcccctgcgcggtcctacgtggccgctcagcgatggttatccgccgacgattgtctaagatcgacctggcgctgagtgaagagcggtcgcgatgtgacgaggacgctattgagcggcaggggttggggctgatggagccccggccggtggatctggggattggggaggtaaagcctaacttcgtgatgggcggcatctttgaggttatggaggggcgggcttaggctttactttgttttctacaatattgttctttctttctttttctttttcttttttttttggtttatgctgtgatactctatttgttttaattgcctttgtatttttcatactagaagttggattgtctgcttccggaaaggaatgtgagatacaagggaatatgtatagtggctcgatattggatatatgttacatattttttggttatatttgagcccttgcggaactagctacccaatattcaatgtctcaaggttgttttgcctaatatcgttcatgtctatgtccctagctaatgcatagtactttctttttaaggttcatccattttatacttctatcaagagtcaaatgcaaaagcgggtaatgccggaccggactagcctgcattctatactccacatctttctccggggaagggctagatcagcctggagaagtgaagcatcaagccccatgcttggccctaatctccggtccgagaaacatagccatagacttccggagaagaccaaattgggggccattttgcgacacttatcttcatttataattcctcccttactaccctccccgtttgcattctcggcctggccatgatcgcggaagcagccctacggctttcatcttctcctagctatccgggatccctgtatgtccccgagcaactcacttcgtcctcgaccacatccacaaactacctagtgctgtggtctgtggagcaagggtaggtacgagacgggctgccgtaagccgctggcccctaacaatctgtagctgccatgggacccttggttgattgttcaggtctatcatcacatacctgcctgctgtggcatcagtaaatggcttatatgtctttcctgatggcagaaactagggatggttataaagttgttgtttcttccagtgaggacgtggtatcagtacttttcttgtgcttttattccggggagcctggggtttttatatgccgctttaacccatgcatatgtggcctcttgactcattgagtgctttgcagcagattaggcacctggttccagcccaaactggactcttccagttcgcttatgtaatttattcctggacaagccctaactagttaactaactagttagcaaccgttaactagttgactagacccccggttcaagggcttataaatatgaaatccattcgaaacatgtctataactatacctacctaggaactaggtggtcatgtatagatttccgcacgacccactgcccactgtgcctagtattgctagggagtcaaattgggtcacaagctttgggtataattccgctgatttcattgtcgccaagaccctaattcatgcacaaattgagtggaactgagggcccaaactggggttcccgggaccgtccctgggtctgggagagcctggtctctgactctctgggttgggcctaggttgggcctgggtctcgaccctatatttgcaggactatcctcttaattcgtctcccacggaccacaggctacggtcccacctcgtctcctaactcgaccgtcagtgcgccagccagctagaactttttatacttcctttactctatcgaaatactagattcagctatatacccacttccctcttatctattggataggcgaggatgctacgtaatgaattatgagagcacgtccacaagggctaagtcaaaggacttgaaagtagtttgaaattagtctttgttgtttgttatctgttgttaattatacataattcttgtcagggtattgtgaagctaacatatggcaaaggcaaaaaaaaaaaaaaagatgccaagatgaaagagattggaagaggcgccttatgcacttgcgttatggtcatgattgtgtaaaaacgccaagtcgctaattagacatgaatcatgatgggggtatgaaaaatcgcaaaagcagaaaagcgaggatattagcggaaggaaagcctaattaggcttggatccctggcccttgcgcttgtttggccataattgacctcggcacttactttcaccacacaggcactggacagcctcagggtcaatcttttgaggagttgtgttctcctcgccctgattatagtcaaaagttaattcagtgccggagggaatgtcgttgtacgcgaaaaatgcaaggttgtacagatattcgtcggcatgattcgtggtgcaaacagggacgatcttgcaattaggattgcatgagtggttcataaaccgagttggcgagccaaacttgcggccgtcgacgactttcatgttttgctcttcatcgtcgtcatccttcacataccagtccaaagagaaaaggtatgattgcgtatgagaaccatcggtgaggctctcgcgctcgtcagcttcaagctttgtaattacctcgccgaggtagaggtcgatgaattgcccacggtgaatcaagtcaggggaccgaagacctaataaaaatcataattagtacatatataggggaataggagtgaagggagacgaaccaaagccccgagctccagtgtcaaagatctccagtctaacagtccttcctttctgaacgacgtgattccagcatttttttccactgcagccacaacgggagttgcattcatagatgatcgccttgcgattaaggaaacttttagtcgccacaatcaatttaggattgctttcgcagatctggtaagggacgattcgatcttctgaatcttcttccttgctgaggcaatcgcattcgagtcgattgcagccgccagtttcagtacaagcacagccgatgttgaattcagaatcatccggaatccgttcaacacctgcgcggtactgataactgttgacgaactcgaagttatcggctagtttagcaagacgctttggggaatcaactttcggaatgaccgtaggcccattgatgcgcctaagcttctcgtcaagagtgtggcggagttttgaaagataattttgttccgtggacgatggtgggttgagagtgttgagagccgagcttgatctgaatgacaatgcgacagaacgacggtcaacacgagccctagaagtaggatatgcagcttttgtaactatttcctcttcgtcggttgtaggaaatatatcactatccattccattaactttagagacatctcgcgcgattgcgatctcccgcctttgctttgctgttggtgatggaatcacaacgctaatgtgagatggcgttatgcttggcgctggactcagcgaggatggacaccacccggatggataagggtgagcatgtgaccgcctatatcgtgcaaacttgtgaacatcgctcgacgatgacgaatctgaggtatcatcagatagcgatacctccacgcttttccttttcaatggcacagttggtggtcgataagttaacgttgtcacaaagggaagtttggcctgaactgatttctttggctagaagtgatgtttagtaaacaatccaagtaggttatgtacgtagtgccggattgccggattgccagattgatagtgagataaacagttggcttaaggggcgaagggaattggaccagacagagaacggcatagtggggccaggagaaatgtagtgggctcagtctttggaaggtcgaggtgaacgcgaacaagcacttaccagctcagaattacccaattcaatctcattggttaggtcaatgaacactcggttctgattagcccccgagccagggggagcgcgtcccgccatctaaagccacgcgtaggtgcggtagggtaaattgtaacaaactaaagaacgcgtgcgaaagcgcgtcgagcctcgcaatttcaatccctttcaggactggacaaggagagtgttggagaacaggctgctaagactattgagatgcttggggtgtcgacgagtcgaggattctagcctaaagagctaggtaaaaggaatcccggagaggagattcgagaaaacaacgtctggagatgaagaaaaagggagaaacaaaatctccaagaagcgcccgtaaaactaaaagaacctagaagaagatccaacgtctgtggcggatgggagacgtgatagaagatggaggactggaggtggtgaagaggtgaggtcgagaaaatgaggacggcaatatcatgtggtggggcaatatatgctgactcagcaccttggtccacattacctaaataggcaatgatcgccatgtgtgttagcgtctttgtggcctcaattcgaagagaaacatgtccgtattatgatttttgagatgctcatgattctcactatccaatgaattgattttaccttgtatgtttccagtttgctgtgttttgggttgatggggtatttcggttagcggctgctgattggtgatcaaaagggagttgtcaggaagtgcgggaacagcgccgggaagaattatgggtctttatttgattcccatagcttccaggcccgagaggaggctagaaatgcaggggaaaagctccaaattatagagctcagtgcctgctatcgattgatatatttatcagctagattagatgtggggaacagcgtataccgccgtctagagagctttgaagttttgactgttgcaaattcttggcatcaatatcggaccatgcgggccgcagcggacctcacttcatccaatcaacgcgctacgttattgatgactcagcgcagggggtcgcctattttggagagatttgatagtataattatctagaatcctatatacgatattataaacgggttataggtcggattattagcaatatgcaggcgtcgcgtgtgtataaagtggtaacctctaggtaggattagtaatatattagtaatcacacgtgacggatctgcacaacccggaagaaattccggtgcatccggtcgacttttagcttaccaggggcgtttggctcccaagaaatccgaaaggctgtctttttggcagactgtgttaaaacttagggctcagggcccaggggctagagttggtgttgaacttgtcgcatgggcgcaggggaccaggggtagaccgtagaagtccctagtcacataggcaccgttctcccattaccgatggccgggaccggggactccgggtcccattaatgatgtcccattgtcccatttgcgatgccccgttacccgcccccgtatacgatctcgattctctcgttttagatctccgagtacaaccatttggccatggctcttaaacacacagccatgcagtcagtgacttaagtcttcaatgttcatgacctaaaggctaaagcccaaatcacccagtactactccgtagtaagagtccataattatagaaaatctaaagttttggtcgccccgggccctacttgcaatttataaaccgaatttttttcaaaatcctctaagatgtaatgaataattttgcttatggagaagctctgtctgtagttaattacttttttattcggtttatttaggaggtatcaggagctctgaagatttagcgatcttagttgctcgggggcagtgttcgttttcgggttacttccgccaactgaccagttcggtcgggcgcccgggcgcaccgacatacccccgacacccccgcctgttcctaagttcgggcaggtgcgggttacacaccaacttaactggcgggccttggaccccgagccctgccgtgccacggcccacaacagcaggtagtgcacaactgcggccctctgcgggtggtgctcctggtgttcggtcccactggtttaccggtattagcaacgaactattgagttacggagaagatcgcatggtttgtatcagttgggtaatccaacaacaagtactattcagtacgggggctgggaatacctatgagtgcaaaatcggtcccgtgatgggccgtagatgatcacatgacaggggtctaggatcacactatcaaattgacattcatgtatttaccttgtataccctctttttcctttattgcatgtatatgcttgacttcgtgtaaaggatatgtctgggcgcacattctcctgctcggccaaaagaccattatatcagagctctcgctctggcatgtctaggaccaatatatatatatagtactgcacaagttatctgtgacacggctccggatatctcctttccattccattttaagcatattagctctgtgcgcaatacttctggtgctactcgctaccgcaagcagaagatcactcccgcgaaggatgtagctttcttggtttattcttccgggactacgggtgtgcctaagggtgtcatgctgtcgcatcggaatatcgttgccaaccgcagccttgtccgtgatcgccagaggttgatcggcaggatcgagggacatctggtagttctggtagttcatgcagggctggcagatctattaggttgaccaagtattagaagcagccaaagtgcgtagctcaagacagacctccgtctacgtaaatacatatgccaccatggccaggtttgatttcgagcccctagactagaatttagggtgttaacgctagcttagctggattgtcaagcgatatctgatgttggctcggcctcgacgttcgatctagctattttaggccgaagtcaagataaagttccgtttaaagacctcgggaaccaccagcaaccgaaccatggtccatggataggtgaaggccctgtatgtatgacctacacgggatgtggggaaagcaagccaacatacatcgttgaattacaacaataacaattgacttgaacttgtttgcgcagtatgcgatagcttacgaccaaagaactctacggaaaattgccgcaaccattttgtatttgtaggcacaacataaagttcataatcaactgtaggtacaacaccatccccctaggccacaacagcaatagagaacggtggggaaagcaaaagctaaagcaaaacgctagcaaccaaatcattctcactcgattctagtgtacaccatgaagaccagagcaagtctagctaggccaatgagtattgaaataggcgagcagtacttaggttcaggacgaaaagagcaaatgacgggctaatgaagataaatgatccctctatgagagacgggaggaaagcaaggatagcaatggacatgcaatgataacggggcagaatcgatgaatactcgtgtgtgcggatgcgtcgtaagtggacgtaactcaaaacaaagcgaataaatcgccaactatgtgccacaaagacaagggaagggggtcttggcatggaatgtgctccttggccaaggatcctacgtcaaatgggacaggtcacagtttcaatgcatcgaggatcttcttcgccatctctcgatattgccacatcccgcctgatacctttttgaattgaataccatggagggagaacagaggtaccttcacgatcaggatttcaaatcgaaggacgaggttctctccggtgtcgctctgtacacgggtagtggtttcgccaaggacacgttcgccgaccggaccaccatgttcccgtgcaacatattcatctgagccgtccgagttcgtggtgaaactgcgatccggcgcagcgtgagctcgacgatgtctagaggacccagtgcggctctcgtctcggctatcctcgtggctgaggaggccgccaaagctgatacgacggcggtgccctgatacctgcccctgtcgttctggactggagggggcaacatcaactaccttgtcgaggtcgatgctgggggcgtggcggcagctaaacccacccttgatctcgacatactcaaccgcgagctgcctcaggacccgaataatgtcagcccggataacgggcaaaggtttgctgctggtggtggagacactgaaaagaccctttaggaacactggtttggacagatcttctccctcgttggcgctctccagtgccgttcccgcgccagaaatgtcagcatcggtctcttcgggcacattggcctctcgggtagcgtctcgccgggcccggcgtgcctgaatactttctcgccgagcgtgtcccagcgacatggtacgcgccgtatgcgtgcgcccaccagtcctcgcgctggccggaactttctggttattcggaacaacctgatcagagtcactggtagacggcggttgacggtctgcagtaacgtccgaagcatctgcatcacttctccgtccggctctccgagttcggtagtctgccgaattgacactggtagatctctccaggaatttgttggaccgtgcattgcgttccgattctggcgccgctagaagatcctgctgtggccggctgtcattcgaagaggtctcgcctggagatggttctgcccggcgagttctccttacactgaagccacggtgcatcggagatgctgaatctgcaggaggttggacattgagtgtgggtgtgttgggagtgctgatgcgttcacggtccacatcgcggctgcgatctttggccctgcgagtgctaaatcgtctcaagattccagcagcagtgctttctttcttggcaggtgtgtcggggtgcgaggtagggaccgcgtgcgcagatggcgtggaagaatggaatatcttcaatccttctgaggcttcgtcttcgccatgagtgcgggcccgtggccgagatcgtcgtcctgtatccttgtctcctgccaactggtactgattggtgtgggcggcttccggaggccgcagctcaggcacctgaacttcactgtgggtttgacgaagatcaagggcaccaggtcgtgcttcggcccgctctcggtcaagtttttctttgactagatgatatgtggacaccaacggactgtaagcatttaaagggtcgttgcccagttgcacagcctccgctgaaggggcggaaagggtatcacgactggccgcagagtttcgtcgtttgtagaaatcgaacactcctcgtttgcgctctgtgtgattggaaacaggctgttgtagttcgcggaagtacagccggatagcatgttggtaatcttcggactccaataccttggtcaactgagctgtaatgtactccggaggcccaaagtcaaacccggtcatcttttcaataacctctggatctagaggtagctgtaatggctcacgctgggggaggtaattctccggagggttactaaaacccttgttcatccagggatggttcatgatctcggccaagctagcacgctgcttggggtcagtgaccagcatgcgggatataatgtgtcgacactctgcgaaacacgatcagcaatggaattagagaaagcatcctgcaaagttgacttaccagcggtgagacctggcgggtactccaccacacctttcttgattttggcatgcagctgaggcatactctggtcatcgaaaggtaccttcccacaaaccaagacataaaggacaattccaaagctccaaacatcaacttcgggtcccgtgtattgtctggcctgaagcaattccggagcagcgaaatacagactaccgcagaatgtcttcagaaggcttcttggggagaacaagttgctaagaccaaaatcaatgattttgatatcaccggtcttgctgataaggatgttctcaatcttcagatcgcgatgcacgatgctgttacggtggcagtaatccaatgcgctggcgatctgtcgtgcgaacttgcgtgcttgcttttccttcagtttgccgtgagagatgatataatcgagcatttgaccaccattgacatattcaaacagcatgtaccaatggtatgacgttcgaacaacgtcccgcatgccgcagatatacggatggttcactaggctgacaatggcggcttctcgggctgtccgaatctcctttgagcgatcggctctctctgtctcccgagtagtgcgatgttcctctgtcgagagtcgtggcacgattttaatggcaacctgcgaccgtaatcagtattgttttaagacaacaaagagttgaatatttgtacttgttctccggtctccgtatttttggctaatttgacttttcccatacttccggcacctattgttttgcctaaagcccattgacccgtcggcgtcgtgattgtagtccgtcgcctaggcgcggctgcggcggcgggagcagtggttgcggtcgcatgctgcggcggcggcggctgtgaagccgagcttggtgtcatatcaacactgtctcgtagacggctctgcgatgaggggtttctttggtgtcttcgggcagtttcggttcgagcggtagaggggcgttcctgagatcggtccgatgacgtttcccgacgagaaggaatgcgcgcaacattagacgcctctgattctcgtcgggctacaccctcgagtgcagaatggtttgagggaggacgccggtcttcggaaggagttttcgaatatgacaagttggttggcgtaggaggctgggacgtattggatggtcgaactgccacactgcgcgtccgatgggggagatccgatggggctcgagaaggacgagaagtagttgagtggctgcggaccacagttggtgcgttagtggtcggtactgacattgtggatggggctctctttgagggatttggagcggtcaaaggagtggggagagatgagggaagccgcagccaggactcggcccgagcacagttctagcggtgcgaggagggtttcacagaatgaaacaaatctcgtaacgcgaacgcgatgaaagatggtgatactgaaaggacgagatggtgggggttaagagtaagaggaggttgggatgcggagatcatctaggggcgacacttgcaaggttggtaactaagctctcgagttgatacccaaattctgtttgaggctgggcttcacccccgattatgccccttttttttggagtaattttctaattctttagtttttttttagcttactgtttattttctagggaacactattgacatgcatataaatgctactgtgaccacgtcaccacctggctacgtgcaacgctgaggaactggaactactaatggaacgttcattagccatggtcacgtgtgtccaggtactataaatatctcgaggtcagggtacacaacgttataagtctgcatttatataatggaatattcaaaaagagcatggctgaggcgagtaatgagtatatcaccactcttttggtccgaaagtctctccatctgcgacagtctttcgaactgccgtataaagagagtcctatgttcctcgttaggacccacgtcaataaatggcgggatatagttacgtaccatggtctcgtatggagcaatatttccccaccattggggtatcgagacatttggcagaataatcgcaaagaaaataacaatggtggacagaatgaggcccgagtcaagtcctgcggcggtgatatagttgtaagtatgccaccaaccgccccatcggcgtcgaatccagtagttgaatatgaggccaaagataacccatgaagagaagctcaatggggtggccctgtgaaatgatcagtaagaggcaaccgtgaacaatagcatcgggagtgttgtagacttacggaggcagccaggccatagcacctagcatcctattgatacaattagcacatttcaccaaagatgagcttccgcgacttacacaggtgcgtttaggaacctgagcttagaccgagggcgcattcttatcaagacatagaataccaccggaagaagagcaccaatcaaccagaaccattgtatttgcatgtacatgccgccaggtccaaacatacgtcgtggaccaatgacacctaaataagaagtcagtaatatgttgatacatccctgagatagaacaaactgaccccacacaatgctggatgaaaagaatgctcttccattcgggcatgtaaaattccccgactgagtactattttcatagatggttaatacatgttctctttcaaagatgtgcataacatacgttgtgcaaacttcatcgatattgttcagggtccagttcatgactgcaatctgaacaatacttgcccataccgttgcaacaacttgacacataaaggtgacgcggggtggcactttcatataatgggccagctgttgttgaagaaaagtcaacaatttggtccactgacatggagaggaagtcccttactttgagatccgaacagtatacttgactattgacaaggtcagtcactattctgggaagagaggattgaaccttacgcttgtcccaaggtgatggtgctaaagaccttgaataccatgaccgcaatcggctttcctggaatcatgaaacctgccagaaaaggcgataagacattgagcgctatataaattagcgttgcacccacaaaaaggtcgagaccgcacgtacaaagcataatattggtgatgccgaggatcacgcaagtcggaatctgttggatgagtcagaaagaaccttccagtggccatgacaaaacgtactataaagacgacggcaatgataattgagacaaaaaagccccaccctatgtttgattagatttgatcatcagatctcgaggagtattgcatacaagggagctgcgaatcatatgccagaatgcctgcaagccctagtgcgatcgagcataggaatagtgtcgcataccaccagtcgggggcttctttgtactttttcatcatgataagatgaatgtcgggttcctgattccgagaagccctgaattgatgccatatctcctttcgatggaagagaataacatgtacaatagctgctgtaagggccgcaaacgacaatccgtagttcaaggcaaatgtcggagctaggaacatcggcgaatatgccttgtatttttcctcatcaaaagagaaaccagaacctaggattctggtcacattataggcgctttgcgtgttgtcataggtgctagacgtgttgatagggagataggcggagtacctatattgtgtcagctttgaaatgattgtggtgagatgtttcagcatacaaagccccagagtaagagatcccgattgtggtgatgattacaaaaaccacaagcccgatgaaggtgttgacaagagcatggacaggtgccaagagtggatctccgagatatgcagaaacatagctggttgtaattagctttacatctttccagcatgtataccattgacgggaatcttacgtccaatcaaacgtgataggaatgagggagagtcctgtgaagcctccgaacaactggttcaaaaccacattgttgggtcggatccctacaggcaaaaagagtcaccgcaagtcaggaatgaaacgagtcaacgggatcttacatgtgacaaaagcaaacacagagagtccttgccataggactcccggtaccctgcagttcgaagaaatcagtatatgcagttcaaattagaacaagatagacttaccaataccagataaaagacccaattgtcacatatagaaaatatcggtagcgtgaaatgctccatccgtgggtctctgattcatccgaggagctccagtcgtgaagagcataaaacagggaagtgttcgcaaattgactaggccacatcatagcagcgggccttgacatcgtgagtttttggggctcttggcaggaaaggttccaacttaccagacgaggaaacggcggaaaatgcctgccagggacataccaattacctgactgctcaaagcgaataatagttggaaaccccatccaagttccatattatatagtgctggaaagtgcgttagacaatattgaattgacgcagagatgttgcttacgcttcgctttcaatgccaagagggcatctgtacaataagcatagccgatcgacacactatatattgcttagcattgatatcaaagtttatcaagaactaccgactttgccatgatctgagaacaaaaggtcagcttaattgatttgaacaccaactttcaagagcttactgtgataaccgcatgctctttgatagtgaacggaccagtattcaacgtccatttcactccaaatgtattgaacttccgagtcggcattgtcttggcccacaaacaacctatcggatagaccagcaactgaacgacaatagcagggaacgagatggcagggctcctaatacacgatgagtaaattatcccctacttatagaccgcagaaccaaatctcacctcatgctcagaaacatattgagaccacttccaagagtagtgaagaacatgcccagcacccacgcgcgcacggtgttggcaacttctccgccatctgagttgcgcaccgcggcacgaacagactcatactgggactcatgggcgagagtcttttctaactcgagggccctctcttgatcatctgtcttgactgcctcgttgatagcatcaatcttctcctgtggcaaatttggatcccactggtgggagagttggaccttgtgtaactcttggatcgtattggttactgacttcttatcgtttggcatgtcgagctgggatgggtcaaggccctccgtgacaggtagatgcgaactcattctgcaacaatagggcaacaggtaacctggttagggtctaaatgagatatcggcttagagttaaaaacttctagacatggcagcagggctggaataaatacaaaaagagagagatgaaaggagatattaaaggagattatctatcacagcaaatggccgaggcctatactccgtacaaagcatcagttgagcttgagttttcttatctcaactaggaaatggctatactaccaatgtaggtgtatgtatgtagacaagtccaacccgagccggatcctgttgccggtctagccgttaagatgataagtttcttgaaagacaatgtagattttgatttattccccgcattccagccctaatcgcgcttgctattcttccgtcaagataacaatctacctgctttaggtataaatgcggagaaaggccgcgcaactttatgagctagtttagtccatgcgatatgaacaaaaaccaaccattcggaccgatcagcgacaggggatataatgtcggagacaccacccgatgtagtaacttgtggtaggacttattcattttaatctagggcgctacaatggtctgtgttcgtttacacaagcctatctttttgtttttctgtctagtcccaggaaagagtttcttatccatttcacatgtcttcttgttccgatttcctacccctgggagtcaatttaaacaaagatactttttttaaaacaaacaacaggcaaagtttagctattttcgagcgaaacagagcgagccgcattctgcctgacatggtatctgtcacgtcacccaggggcattgccatccagcgtgcacaagtcgacacaatacgcgacaggattgagcgcatcaccgaggacctcaaagatatcaaggaatttttccccatcaagatatctccgaggagaacacaaaagttacgccagttccttacatccgagctcgactcactccgcagccagccctttgatctttatgatcagcaagggaaggtagattatattctcatgaaaaactacctagaaaggcaactccgcgagttggaactcgactgtaaacaggatgaaaaaaccgcactgcttctaccattctcaggcaagctgctggagctgtgtgaagctcgcgttatggtgttatcgatgaatgcaaaagatgctgcccagaagcttgttgaatcccaggctcaaatctcagccgtgatagacatggtcaagggcgattcgaccaagttccggatggagaaaacaattgcatttagagcggcgagaaatatagactcattgcacgataacctgaaagaatggttcgaattctacaaaggctacgatccgtcgttcaattggtgggtgtcacatccatatggggttgtggaaaaaggattgaaagatgtctcagcaagtattcgagagaacttggctggcatccgcccagacaacgatgatgcgatagtgggcgatcctatcggtcgagaggggttgcttagcgagctcttgggtgaaatgattgcctacacaccggaggaactaatctcgatcggagagaaagagttcaaatggtgtgttggcgaactgaagaaggcatcacgcagcatgggattccaggacaattggaagcaggccctagaagaagtcaagaatgattttgtcgagcctggaaaacaaactggattagtccgagatctcacggtggaggcaatctcctttgtcgaagatcaccaactcgtcaccgttccgccggtcgccaaggagaattggcagatgtttatgatgtcgcctgagcgccagaaagtaaaccccttcttcctcggcggcgagtgtataattgtctcgtatccaaccgaccagatggatcatgaagccaagctgatggggatgcgcgggaacaacatccatttctcccgcgctacggtattccatgagatgatacccgggcaccatttgcagatgcacatgatcgcgagatacagaccctaccgccgcctatttgacaccccgttttggattgaaggatgggctctgtactgggagttcattctgtggaatgacgaacggttcagaaagacgccgcagaaccggatcgggatgctattttggcggcttcatcgatgcgcccgaattatattctccgtcaagttccatcttggccagatggctcctgaggagtgcattgatctacttgtcgatcaagtcggacacgaacgtgccactgcagaaggggaagtgaggcgatcattaaatggcgattattcgccattatatcaggccgggtatatgctgggtgcgttacaaatatatgcattgcggaaggagactgtcgagacggggcttcttgctgagaaggaattccatgaccggtttttgaaagagaattgtatgccaatagagttggcacgagccttgatgcaggatcaatcgttatcgcgtgagcacaagccgtcctggaagttttattccttgtagaaaatattttgtcgcggtgagcagggtgatgagaaataaatgaaaatattgttgtctagttatatatcgaagagcagtctgaccacggtcggctagcaagcatggggattacacagaccgtagtagacatccttatctcttaatgcagcaacatcctataagctcccttctcattctgtgagtggtgattggactgtcttctccccttcaggattctggtgcacatgaaggccccgagattttctctctgcccgaaagataaggccactacttgaggattccagctttccccactgcaatatatatatttccatgaatccaacacttagccaaagcacaaactacccatatctatgttttggcctcatccttgaaagccagaatagcccctggttttcgggcggaagcgtaatgacttctctgccgaggtaggttaccataattgaaatcttccttgcttgaaaccccaaagacgacattttttacctcagtgaggaactacaataacgtacaggttggagttaatgtgtcattatcattggtggatctagataccgggtgactcccactggccgagctgtgcttctaaacgtagtctatgtaagcaagagatgttggaggcgtacgtgggacactcggatgaactacgtcataggcctagacaagaagcctggggctaatacagtaacgtatgacttgcataggatcggacagcaaatcagccaggtccaaccccgcagtcgtgcatagccacattaggtgttaatgacgagtttacttctagacaaaatcacatcttctagaaaagtaagggctgtttgaataagcacgtgtaacgcatttcctgtatcgtgaaggcaatacggaggttaagagcaacaaaataaatcttacctcagagagacacattactctgtgtcaatttaggtgcgtagtattgttgattccctataataatgatcatgacagcataatattccatggacaactatgtatgctcttgggatagctacattaatggggtaaaggtgcccgttcatacgtcatgcagccagatgtgtgggtccggggatagtttaggttgatctcaaccgacgcatatgtggaataacatttgaacgaacgggctttggaagtagatggaaagtttgagttggctatgtttttgagagcctcaaataatgttcacgtgtgtattataactgtaaatcgaacgctttgtcttcctactaagatgaggtcaggaaggttagaaactgtaaactgtggatagagccggggggctacggcaaccaagattccaagattccaagattccgatgtttacaatgcagccaaccttggcgatgtatgtgacctaaggaaactgtgagataccacggtgatgtcatcatatcattgcccctgccccggtgggactccagacagcataagtagccttctacttcccttggaattgacctattcttcatcacaactcatcctctactatctcaaataacttttcaaacaaccaaacgctcaacttcaaaatggagaccgccaaggttcgtgatcaaccaaaatctcttggtatttgctttatcattaactaaccaacaattatagaacgtcgttaactacgtctctgagaccatccagggaactggtgctgaggcttctaaggaggctaacaagagcgtcgccaaggacagcgatgccaagttcaccacccgcgccagtgctgccaaggatgcacttggcgacaagacggacgaggttgaacacaacaccaaggccgatgtccacaagggtaagctggaattatcgaacaaaactgctctaaaacggcactaacaacattccagaggctgccaagcactaaagtgtcaccttcacttgttatgtacaccatctagacggaattccggtcttttgatgatttgacgaagtaaatagttagcgaacaataccatctacaatttacgacattcacaatatctacagatagacttttagtaattaattatgaggcatatacttgacctcgcgtagaagttgtaaaaatgactgacatgtgcgttgacatgagcctgcctgcaaatcgaatttacaaaatataaacctttggcactctcccataacaaacagcaccactttgccacgtggtatatttggaaactagcgcagagcctatcggccatataccgaagatggtgggtgcttgttctagtgttattgggtggtcggcgctggctagactcatgattagaatgcatgaatcggaatcgggacttctggattatgaccggacttgtgataagaggctttatgcatataagcagccttgggcgtgcgttgtcagagctggatcatggtataaagctctgcgatctctgctcacccggtttacccggtttaccctgttcaccctgttcaccctgctcgactgctcttgccaggatgcatgaatcagaatgaggactactagcttcttactggtcttacgataagagacttcatgcatgtaagcagccttgagcgtgcgttgtccttgtttatggtctgaagctctcaccccgcttagctgctctgctcttgccaggatagcggggtccagccatccaacaagtaattgactcaaactatgaagcaagtaaattgattcgggcttatgaccatttgccagggtaaagatgttatctattaccagtgcttggttattctgaatatataaacggcaagaaaaccacccactccttcttagattcaatctctcaggactcttgcatccgaaattaaaccctaatagtaccgacatagtaagtttaggctgtcttactacactattctaggtaaagattttacacatagctaatgtgatacctctagggctattacctacctcccaacacgatgtgttataacatgataacatatagctgcggccacatcctcaagtcgcagtcgaccacctgcccatgtgacaagaaggatccggacatgacctcgagcttcaagtgcaaaacaacatgtaaggggtgaaattggtcaccatgcttggccgcgccggagcctcgtggcgctcgccaaagcacctttgagtactgaagggtggacaaattaccaaggtttctagcagggatatttgtttcaattgctggcagagtagctcttgcaacttgggaaggagagtggtaaaccacagctatttattatcttgacctcggaggctatcaaatattgtgcggttaaattgctatgactgaccattcctacctagtaatttatcttggaactaggactgaatcgaccttaaaatcgttcacttgcgatgtctcgtcaatagggctcgaggacgtactcaggcatcaataatggcctcaggcatcaaaccaaagacaaacttctcaaacaaccttggaacccctggagaatatctcaaacaagtccacaggcacaactgtacctgtacctacatgaccccacgtcctcagtgctaccttggatctgacaatcccgatgttctagactgcattaactgattggcgtaccacttgacacagactggtggactgccaatgagaccctggtagatgggtcggcaacgagttgaaacgtgttaggggtgccacaggaaaagctagtcgatgctgacgcaaaatctgatctccagtgccgtggaaacaacaaattatacggagtacatacctatgtatgaggacttcatgaagacaagtggctacgttgtggctcccttttccaacggtgatcagcattatatccatgacccaattctaattataactagtccagaccaaagtttaccaaagtccactaaagtccaccttttttttctctttcattcgtgcgcattatctttgtctcacatccgcttgtctttcccattcaatcgccccgttcccctcgtttaatctattttatttcgacttcatgctgggctcttgatctactccggcccctcgttcatgccggatagtcattcgttactgctttgacgtaatggatctacaacaattgggcttgcatgcccgcacggatgggacagataccttccttgagctcattgcaaatccatttcggtctgcagtaagtcgaaattgtttgcgaggaggaacaccacattgacaagctatagtttacagtcactgctatttgggcctcgctaggcacctcgatcggcgtcaccgtcctcctcgctctcctcttctccctagttcgaccccgtcactcgcttgtctatgcgcccaaagtcaagcatgcagacctcaaacacaccccgccgccggtgggcaagggcttcttcgcctgggtcaagccggtgatcaatacacgggaaccgcagctgatcgagtcagtcgggctggacgccgcaatcttcctccgctttacaaaaatgtgccgcaacatcttcatctttctcagtataatcggctgcctcgtcatgataccggtcaatattacacagagcaagaattctactgactcgacggcgtctgccgccttcaacatgatgacgcccctcaacatcaccaaccccatggccatttggagtcaagtggtatgcgcctgggcttttgatcttattgttgctttcttcttatggaggaactatcgcgctgtgcggaacctgcggaggacatatttccaaagcgctgaataccagcgcagtctgcatgccagaaccttgatgatcacggacatccctgtcaatagtcgtaccgatgaaggtattctgcggctaaccgacaaggtcaatcccacctcggccctcccacgagctgctattggccgcaatgtcagggatttgcctcgcctcatcaaggaacatgaagaggttgtccgagaactcgagtccgttttggccaagtatcttaagaacccggaccgattgccagcgaaacgaccgaccctacatccccctcgccgacaacgcaaacaattccccggcggcaaagtggacgcgatagattatctatccgtgcggattcgcgtcttggaagaggaaatcaagcatggccgggcgtcgattgatcgccgaaacgcgatgccgtacggctttgccagctgggacaatatcgagcacgcgcatgctgtggcatggaacgctcgccgcaaacgccctgagggcactactattgctcttgcgccgcggcccagcgatatcatatgggaaaaccttccgctttcaaaatccgcgcgcaagtggaagcgactgatcaattttatctgggtgacaggcttgacactggtgtggattgttcctaacggtttgattgccattttcttgtccaatctgtccaatctgggcttggtatggccggcgttccagacttcgctggcaatgaacccaaacgtttgggctgctgtccagggtattgcatcgcccgcactaacttcgctcgtgtatctggcgcttccggtgatcttccgtcgactttctatccaaggtggtagcaagactaaaacatctcgagagcgccacgtgctggggcatctgtatgcattcttcgttttcaacaatctgatcgtcttctcacttttctcggctgcttggtacttcgtgtcgttcgtggttgacaaaaccaaaaaccacgaagacgcttggcaagccatcttggaaagccggatgtatgccaaattggtaagcgctctctgcaccgtgtcaccgttctgggtgacgtatcttttgcagcgtaatctcggcgctgctattgatctggtgcagttcgttaccatggcttgggtctggttcgccaagacgttcctctcacccacaccccgacaggcaattgagtggaccgcaccgccatcattcgactacgccagttactacaactacttcctcttctatgccaccgtggctttctgtttcgctaccttgcaacccatcgtactgccggtgacagcattgtattttggtgtggatgccatgttgaagaagtatctattgatgtacgtgttcgtgactaagaatgagtctggtggtgcgttttggcgtgtgttattcaatcgcatgatcttcgctactattcttgcgaacgtgatcatcgctctcgtggccaaatcgagcggcacgtggaacatggtgttctgcgtgattcccctgcctttcttgatgattggattcaagatctattgcatgaagacgtttgactccgattgcgagtttgtaaaccgtgcaaatctaagcgatgccgaggccttaggtgtgaacacctcagacaagaaagcgtcagaccgtctgaataccaagttcggacaccctgccctgtacaaaccacttttgacacccatggtgcacgccaaggcagccgcagcactaaaagaaatctaccaaggtcgtctggaccagggtgacatgggcggcgagtactcagacattgcaatgaacccgatgctggcctcccagcccggcaagtctgccgaacccgcgcccttcgaggtcgtcccggagaaccatctagacttctcctactacaaggatcgagcagacttccgagacgagttcggaggcggcatctacggccggcctgatgacctgatgacagagcggtcacatacaccccgcagtaatttgcgaggcgagtggtctcccggctcatctcgtgcctcatcacccgcaccctctctgccatcaatgccgctgaacatgcacaagggttacgaacacgaacactccgacccgaccgggcttatccacccggccttccgtgtgccgctatcgcggggcaacagtggcaggtcggctgcaaacgcagacgagtcggagtccggactcctcagcaatgcacaggctcctgggcagacggatatcacgaatccgctcggtcgctggaggaccggtggttatggaccagtcgaccaggaagacgagccctcgtatacttcttacgacgcttaccgttcacatgggtaagctgttcggtcatattagccctgctgggcgaaacatttgcatctgtatagttttgtattctacaacatttctcggggggactcagcgtcatttctaaacacgaaggtcacgatttatttttttgctctgctcaaggcacatcttggaaatcaccatttacacgaagtggacaatttaaatatcatatttaatatcaaaatatcaaacttttacaaacccattcaacacatcttcagatcaatgccagccataaacacaggtcaagcctcacgtgagtattcagggtccagccaatcagatcagagtaccccaatcgtggaatccaagccgagcaagtgcaatttgactctctacagttcatttactgagaatcaaagcctgactctaaaaaatgaaccaaccgtgaaaaaagagctgtcagcagtgggtggtccgagtcgcagcgcgccaaagcaccgacacagctccaacccaccaacaaccgcaacctcccgaggctcacgagcgctctaatacacagcaaaataatggcgtggtactccatcctcccgccgggactcaccgaactcgagacctggttagctcgcatcttcgtgagtttccctctttcctctccgactttaccccccctcgtgacgcaccccttatgacgcagtcgctgacctaccccggattcgcagttcttcctcggtctcatcaccattggcccctgggccttcctcgtactcctagacgcaaccatctggatatatcgtatgaccctttgggaggtcccctggattggtggacgagcacgtggtcgccagcgccctcgcgcgccgagcttgaatgaacgcccggacgggcaacggagggcatttggactgcgcggcgtggagacggataccgggagcagcgagggagaaaatcaagatgattctccagggcgaaagggggagaaagatcgtgacgactctcagaaggagaatgtgagccctgttgttgtccaagcattaaatccacatttgagtggagatggtgtcttgaaacaaaggagctcggggcagatatgatgattggattgcgtctcctttggaatagtgatgatgtttatgaatcttgtgttattgttgtctcttgtcgctttgactatatgagcaagcatacatttcttttattgctcgtctcgtcttcccaggttgtgtgtgagaagacttatatacctatacatcgaagattgtatgatacttccagagtataacctacaatctattatacaaagccctagataatgagtagccaatcttacaataccccaactgtcttatcttgaaagtgccaaccccgcaggtcccgacatctcggccgtgtgagtcaatcagagaacaatggacggacagttcggccactcaaagtggggagagataagctccaacacgactctccaagccaagttcgctttctagtgaggagttcatgcggagtaggaggttgttcaaggataaaactctccgttgagcagggatctaaacttcgacagcttagatccactccatagtgatttgagcaggatggcacgcattctatacaaagccattgatacaccatggcctccattctccatatatctgttctttgctcttatcgtgggcacatgtgctgctgtgtggagggttcgacaatcccgtaaggctaatgcatacgggaggacgaagacaactttctcggacaataagacatcccccatcatacctcttgaaggattcaactgggaggagaccgagccgttacaattccggccgtttaaagggaaagacaaatacaacttgaccatgggtgagtccctcgtctgatgctatacaaatataccatactacaccactcgacacatatcgagactaatccatatcagcacttgaaagccttgatccgtccgagctcatcccaatggacaaaacatacaaggaccgactagctctccgcgagtccgtaatcgaccagcaccacgacatcgtggtgggaatcaacaacgaccaaaccccagaggaggatcctcgcatccgtcccgccattagcgaactatacaattatgttctgggaacatacctaccaacccgatatccgagcatgttccgtctaaccgttggaagctcgctcttccacaacctggtaacaggcgcaacgtggccgacaacgctgtcgccaacgacgccaacaatccaagccctggaaatcctgacccagacggtagacgaggatttcctgatcctgctccctgagttattccccgaaaatgaggaacagccgaaatccgtactacaggcatatgcgatctgtttcccggctggcttcaacatgagcgagaaactcgggcagcgtttagccgatattcatgtgccggtcccggggtatcaggaaaagattggacgcagcatggatcggttctttgcgcgcattgaggttgggaggtttgtgaaacgggctaattggagtattactattgacacgggcctgtttgctgcttttggtgggacacatgctgagccggggaaaaaagaggaggctattgagcccgggaaattgaatgttgatcaggtatgttggcttcgaggaagtccatttgatcggatagtgctgatatcactaaagacttgtctccgatgtgagcgtcagacgttgcatcggctgccggtgtccaaggctctcgtctttaccgtccacacttatctttatccaattaagcagattaaggatgagggttctggtgaggaccttgcgaacgcggtcgatggcttgaagaggggtaatgtgccaggaatgcatatttataagaagggagatgtgtggggagaagcattgaaagacttcctaaggacttagacacttcagtatgttggagttctgcgcaagatacatgaattatatggtatatatgacaccaggcttggactcagaaagggcgtttctttatttatatgcattgtcaaatttttggtttgattcttttaggcctccaatgctcgcaatttagcggaggcgctcgacaaccttgataagatcggccgaaacacccatagcggtaacttcaccaccggcaccggcaccctgcacaatcaggggattggcaccgtagcgcttagtgtaaaagctgatgatgttgtcactgcccttcagaccagcgatggcgctgtccttatcaaagtactgcagaccaaccttgacagccttggcggcgacatcaatgcttccaacgtagcgcacaaccttgccctgcttctcggcagtatccttgatgttggccatttgggcatcgaactcagggagacgagtcatgaactgagtaatgccgtccgcggatgaaggcagagatgcgagctcagcggggatcagcgactcaatagggaaagagtcagggcgggaaacctccagaccagcaatacgggccaggatggtcagcttgcgtgcaacgtccatgccgttcaggtcatcacgaggatccggctcggtgtagcccagctccttagcctgggcgacgacagcactccactgggcatcagaagcacctgatgcaggggcaaaggtgttgaagaggaaggagagagtgccagagaagacaccctcaatgcgggtgacctcatcgccggtagcaaccaggtccttcaaggtcgacaacacgggcaggccggcgcccacggtgctctcgtggtatacgagagccttaccctcagccgcagaggcaaagatatccttccacaaggacagatcatcggagaatcccttcttgttgggtgtcaccactgagatgcccttcttgaggaatgtggggtattgccgggcgaggctaatgtcagaagtgttatcgaccaaaatggctcggccaggtgcggaggcgaggtatgtagcgatttcttcggcctggagggcaccgctcttggtcagcgatggtgcggcagcagcagtggcccaatcggcggcggggatggctggcgaataggcgggactcggggaaaggagggtctgggaggaacgggcaaggaggacaagctggggtgcattggggagacgagcgagctgttggaggaaggccgtaccaacgcctccgacacctaattgataaaatcgttagtactcaattggttggacttttaaagctcagtagtgagggacacctaccaatgacaccaaggtagataggactagccgacatattgctgattgatgattttttttcttgattatttcgatcagcttaactttctgattctcagtcaagagtccaatatcagatcaaaactaagagaacaatcaattgactcacggcgcaatcgattcacctgagtagtgggggtgcggggctgccccgaatatcggcattagtcattaagagcggcagaaaatgacataagggttggcggtgtatattggcttatcgataagccggtggctgtaggaaatacggtaaactccgcgcgtgaaacctgtaacttcttgtcactacacgtgtatcattcacattatcatgcctgctgatcaggattccctctacgggcagccgcgccaaaaaaagaccaaaaccgaacaagtcacctcctcaagcctcgccttcacctctcagctctcttcactcatcgcccaagatgcgacctcagcttcgtcgcggggacgccaccgtccctccaagaatccgaagtctgatatcttttcaaagcacaacaaaggtactcagaagcgtgcagctgccgatcttgcagatgacaacagggctctcaagcaagttcacaggagcacccaggacattggctctgttgacgccatcacactgggccggtctcgacgtcgaatgcaggaaaaggcgcgcctctacgaagatatgaagaagggattacatcttgccggtgatagtgatgatgatgatgacatgtcggctgatccatccgatccggacgcctacctagcccgactaagacgcaaggagaaggacgtattggttgattttgatctcaagcacgcaagcgaggagcaactcaagcaagatgagtccgatgacgacaatgcatccattgtttcctacgaagacgaatttggccggtctcgccgtggcactcgcgccgaagccgccgaagcttctcgcgccatggatgaagaagcgggtgccaaagctgcccaagaacgctggcgccctgctcgtcctgacaatttgatttacggagaggccgttcagaccgaagccttcaatcctgatgccaacattgcgtcgcacatgtcccatctcgccgctcgtcgtgaccgctcgcctaccccgccggagaagaagcattacgaggctgaagcggagattcgcaaccgtggaactggattctatagcttttccaccgatgagggggagcgcaagcagcagatggaagaactccgagttctgcgagaggaaactttatccaagcggaaaacggacgaggaacggatggctgagcgcaaggcccatttacagtggcgatgcgaagagattcaaagactttctaaggaaaatatggagacgtggcgcctagaggaccttgaagccgaacgcaaccccgagccaaaggtagcccctccacctaaaccacccccctcaaaatggctgtaccctgagtccgaccccccgtatgactggactacatgcccactggcacgacggtacatgttcatggatcatcctgaaccagacgatatcgctggctttacaggggataacaacgctgcaaaggatatggacacttcgtaagtttctttcatgatgttccgcatgtggccaagtgattcctcatcacctttccatcgcatctgctcgcgcttcaatgtgctttctggtttctactttgcgtttcttttgtatatgtgatacccctagtaagttggcttaaatttatttctaaacaatggttttggttgaacctagtctacgtttaggcctagcagaaatatgggagcgaagaagccatggagctgtagaggttccacggcgaggacaatccattatagacatacatatgtccaaagaggtaccaaactagcaatccggactactagaaagaaatccacggctcttgaaatcttgaatcatcgcaatcatatcaacataactcataaatcatcatgtcagaacagagattccaattaaaaaccatcagtccaactgttcctatcataactcaatcgcccagttcatccatgacatccacgaacatccgagcatctaaacaaacgtccaatcagtcaacaatacccgagactgttgcgtccaaccacttaccagaagagcgcgtgaactccaggatatgataaccttgtgaggtctgcggggggtcgtaatcatcgacagacataaatatgatgggcttgatatcacgcacaatcaccgttttggaaccctgcaacttaagccaactgcgttttccaaggttgtgggtgacgaatgctgtccagacgggtgtgctgtgttcattttcattagaattcattttcgatgtttaattcgtacaattgacgcttgacatactgattcatctcgcctaggtggactgacgcctgcattcttacggctccagtcaccgtgtctttgtatacgcgcagcgcatgcatgtacccatcgtcggtgatcgggctagaagatatcagcctgtctgaactcaattatccttggtatggtgtggattgctcacgctccaaagcgttgctgttcgtgtgtcagctcgtggtctaggatttctcctataggatggcctgcatcctgggagcgcaaggcgaggaatacgttatggaatatcactagatctgaaagataaagctgtaagtatgtcacttcaacagcccaaggcggggttttcagattagcattgctgaccttccaatgtgctgaacttcaacagggtccataaaacaagctctgttccatgattccgccgcctgcacagtcggaggcaagagccatctcgcatgagctcgagtaaattcagcggcaagcagtagtagtcgctaggccccgtccggtggggcttcttgcaaaggatgcggacacgatggtctgttttccttagataaaaggccacacgcatatcggactcgtcgtttaggcatctatactgtgttaaaatgtatgctcaaaggagtaaaatttcgcaacttgcaggtggatgagttcctcatagcccttgtctttaattgattgtttaatgccaggttgagattctccgcagcagcgtgacctattgccaaaatatgttagccaaattctgagaactaaaccaagctatctataactcacttttctctcgaagacggtagaggagtgttggtagtattacacccgaatgtatccttggcccagtgttcttgaataacatccgcgctagtactagcagatgtcgaagtgaacggcgagagcgggatatccgggacagacggcgggaaatccgaagaagtgccggaggaaggcgacattggcggaggagacatatgcgacggccgagcgcgctcgaatgacctccggcgccgtctgttcaggtcaataaccgggcggccactcgtcggacgttccctcaccgggcgctcccttgggaggcgctcccttaccgggctcgggggagtcgctgggcggtggccgataggcgagtcatccgggcggagtgtcatgccttcaaagcgagcagcgaacagaccatcttgtatggagagtaaggccttgaattgattgacgagcatcacgagggttgacgaggtatagtgaccactaacaacgaccaggaataagtacacgcatgcgcttgtctactagttttgcctggcggagcacctactctcttaccaagtcatagaactctttaaaggccgtcttatacttggctaggcgggctgccagggagtagtttgattgatcccaaaagaaccgactcataaatgcccatgtgcgcttgtacatcgctggactagcatctgggccatcaagacgtctgaaaatatcgccgatatcctcaatcgtatatgtgaaactggcttgcaccacggtcaaatcgggtttgatcatttcaaaatagcggcgatttcggggatcttctgctagatgttgcaaagcggacaaggatgagctgatggcgaataactcggacaagagcgccgagatctcgctcatgtgttctgggagagggtctcggaatgtataaaaaccagccgccacgtcgtcggcgctctcacgagacgcgcgcagagcctgagccatattatagtacagggttaggccatatacgggttggtgattttcttgggggaggcgcggagggatctggtggggagggctctctcgaagggggagggggctagggaaaaaattaggaactaaacaataggccaataggctcacatgcgcacaattaacattatttagaaaagacgaaacgaaaaacggaaagaaagccctcgagataagaagcgggaaaagaaaaaatctttgcccatgaggctctcgagacagggttgtcccaggaccgacgtgttcacgcccgaatggcggggcttgtggagtcttggtctcatcgtcatctctttcgcttttctcatagaccgcttgttcacggatgtatggaggatgtagagaatatagagaatggctctgtatactcttataagctcggtataagcttcagttcatagggtcgtcccggccctaaatgcggagaagtggtcaattttatgcttatggctctcagttagaccaatcataggagcgctttggggtaatactccatatggagagggaataaactgtctaacatgagatatgcccgatataactagccccactaggtaaaatacgtggcatacatatgttccagataaactctttcccggtttgcttgcatatgatatcaaagtcagtgaaattaagtaacagaaagccaatcctaccaagttaattggtttccttgaaatctctagataaatgcgcttcttgccggacttctataccccacaaccagaagtctatatataggtaatgtcgagcaagtaccaccgaattacgggtccctgagcgggcttttgcgaggtccgatggtgtcgttaatccccacttcatatccccagtgatttatgccatagcgagttacacattccctggttggaagaaacccgcgaaataccagacaccgctcttcacatacagacgatgctagactctatgaggccgactttaggacactatagacccaacaaatgtcccgctctactagcggatgttatcgttgaattcggcatatgaagaggtatagcttgaggtagcgcgattatcctggacagtcagcccttcgtaaggtgacggagcgctgctggcgaatgcgaggtcttcggcttctttgcctatagacaacattaaaatgaacgcaccgtgtgatcattgcgagtgaataaaagagaaggcacacgagaaacgggcctagtcgatgtttgctgatcgatcaagagtcctagatgggatggttccttccctgctcgaagcagctggggcgaaacatgatagaccagcctaattcagcaggcgagaggccgcgacaactgatgtctaaaaaatggtatctgacagaagtgggagtcagatgcaatcgcgagaaacagttgattttgcgtgtctctaaacgacgaaatattgcagtcaactctcgaaactggtcatggaaggtactctgttacccccaaagaataaaaggaaatatatacccactgaattaatctcaattccaccaaattatacggaaagcgttgatttcgaagttctgggaaagctgtatgaattttacgatcgtttaaaccgatcagccatctggttcacgtaatgatacggtgatgggtagtgaagaaagcttgagcatcaaaacggaagggagaaagccatcgatcgggatcgagagcttaggatcggaggtctcacgaacccaagctgcagatagtgtacatcgtagttttagataccgccttgtgatcgatccaggtggcatttgttcgacttctgcaacatagatttagactctccaatgaaatttccggtcagtaaatgcagaaacattggttggaactcttccagcatctgaaacaaatccaaagttaagcttcgagcttcgagcttcgaccccggattcttagggcggtgaatgacgcaggcggtgagacacgcccgattttgcggggcaaaaaagctcaagagctctggagagctcccgaagcttccccgaagctcgacagccgaagatcagacctaaagtgaggcgaatctgaacgcggcacacaagacccctcgcacaacagactaaatcctgattttgaatcatccccataagctagtgatattgccaagacttgcttgctatttttacaaccattgaaagcttaatggaactggccttgacactaattaaaaaaaggttgagatttcccattgataacttaataccctcgataagagcaaagaggaacagttcagaagcaagtaaaccccagccgtcctccaaacccagaaaccgtgcacgaaaccgtccgaaaaaaacatcaggagaaccattagagaaacacaaacgcccagaggcaaaagacgaagtgaagctagagggcgtttaagaggattcctcctcttcctcctcctcagccttggcgaggtaggcggccttctcctcttcgtagcgcttcttgtcggcggcggccttagcatcgtagggcttgcggtcggtctcgctcagagccttccacttgtcaccgagctgcttgccaacctggcctgtgggggtgttagataagtacaatggagttggggaatcaattcactgaccgaagctgatgccggggttctcctcgcggaccttatcacggttgtcattggcgaagaacatgtaagcggacagaccacgcttgggcgcgttggggtctaagtcaattagtacaagccgttgacgacgaggttacttccatgtcgaacttacccttcttgcggcgctggacgcgcttctcgggggccttgcgggtggtcttggtggtggtctccttaggcatgatgactgtcgaaggttagatgtggtttccgaggattcttggcacaatagataatatgcgggagaaacgaaaggcgcgattgagtcaagtgaaggtttatatgcgcaattgacatgacatttaatgagatcggagtggaggtgggagatgagaagggcagacgcgagtgttggctagacgcgttgcgcgcaaccaaccacttgcgaccgaggcaaaacagagctttgagatgatagggatgagaccaactcacatgaatttgatgatcacaaattaggaatatgttttgaaaagaaaaaggactgtgcgattgcgagttagttgaggtggacaaaaacatagatcgaggtgcagcgcgcgatcgcaaggtcggcgcaaattgggaaaaaaaaagacaggcaatgaggtgaaaataaaggattgcaaggaccaaaagaactgaaaaaaaaagggggtggtggttgtggtggaggaaattcgattgcgaagtgttgatttatagaactcggggtatatgcagtacctttttttgtaaggggagtttttgtatggggagttggtagtgtaggaagatagtaagagaagagaagagtagaggggggagggccgtagtagtagcaaagagaggggggccacagcaagggaaaggcactggtttcgctgactggctgggagaaaacgtatgatcaatacccgtaacttacgccgtccaccatactattcgtcactgatttctggaaatttacgtattatttcccccaggttaccgtcagaatttccatttagatcgtttgctatgatatattcatgtacattccttttttttttttttttttagcaagactttgtgggcggctgtaccgattagaaaattcaatacggcgtccacgggttatgaaacgagaccatcattccggcacttgggacttgtggattgcgctccgtcatattaataaccgcgcaaacgtacaggtacacggtacgcggtaactccatagtggaagtatctgctcggcaagtacctcgtacttgtcattaccgtggagtgtttgccattgatttgatatacatacttcgtacaatatggcttatattgtaacgttatgctaataataaggccgcaatgatgcctacagttgtggcaagtaggctacgatgtatgtcataaagagtccggagaacccctggacgaaggtacaaatagaatcgagcatttccatgtatttaggtcgggcagggtttgttgtgtacaggcatggaatatcatggacttgcttccatagggtatagcgtatagtggctttggtcgcgagtcgcaaggtcatgtgcaggtacatattattattgtacggggtactttgcggttctagaaagacagatcctagtttactacggggtattgtatcattattcccctggtcgatagaataagaattccgaaaacacggtctacttaagctctcggtgtcaatatcattcggttgagaactctgtgtaatgacacaaaccctaatcatcacgcacgcaacgcgtgtctagacgtgtgtacacaacagtgtgagtactcgtaccaagtactcaactatcatcctcaggcaagggcgactgactggtcgctcaatcataatcgttgcgcttccttttagcgtaacctcaattggaaactcggctgggcaggtacttaggaaggggcctgttagacctgttgataaagggcatacgtgttctagaccctaactagcatggatgaatgtggcataatgtggcatagagttatcgctattttcttagtccgagcattatccacgcctagactgataggttacaaagtgagacggtatggcatgggacggcttaaaggttagactccttccttacagagccggatcacaccatcatcacaagctaaatccagcctggatatcttttccaatatgagtagactgcatggatattccatctatggggtaatgtgctccaatccgtcaaatgcctcagattgctcctttaacttgcagataccagactagtacaatattgtagagttggcagacagattaaaagcaaaagtccgtactcgtactgtagacattgtcaagtccaaacgcatagaccacgcatggacattctggtgttccctgaaagaaacccttctttcttacacataccgttgatactgcagtactgtggatgtgtaaggagggctaatccacctgtactccgtaatgtacggagtactctgtacagttccacgccttccgacaggaaagtgtattgtggactccaaattgatatctcatcgctagctaattaaaaagtgatagttatgcaattatccgagcgtagagcccttacttctcagacgcgaccagagtacaccgctgtgtatagccgtcataattgcagtactgatggaacacattgcccaggtgtaataattattatccagtccacattagttattcggctaaaattaccattctctttttttcttcttctagaaacagaaatcaaatgtcccggagacttgggtaatatcgtatagcgcctgtgctccttaagtacatgtacagttgatggtcggaattaagaaatgtagaaaacgggcaagccgcgtcgcaaaaaagaacaaacatcagtcatcactttcatccagcaccaacgcgcgcaacatgtcgtcatcagcccaatttagtccactggcaacaactacagcacttgcgatggacttcatagtttcccactgagctttgcgcgccttgaaatcagtttcagacttgtccaggcgcgataacagctcggggtcttcaagcttctctctccatgatgaatcttctttcgtgagctctagtagctggcgcactagttcctggttttcgcgattgatctggagattctttacttgtaggtttgagagctgcctcatcaccaagtcatgtgccgacgcgaggttctcgtgtgcaagggcaagcacatcgcgacgattcaccagacaaagaatggctctgcgtatctttgttagacttcggtctagtttaagggctcttcatgggtacatacctctcagcaggggttgcagccttcaggtggacagctttgagaataggctcagtcatgaggatggtgcgaacggccttcctcctgactgtataagtagatcgggcctctagaagctcacgttccgcgattgcgagctgttcttcagcatccgcgcccgaatatgattccagttctaatagaacaaaagtgattagaaaggaaaaaaaaaaaattaaggaaaagaaaacaagcatataccttgttcgagaaatgccttttctagctgctgttcctggatctggttgtagagctgcagcaccaaggcctctttatccgatagagtcacgacatcgcgatagtcatctgcagcataatctaatagtgtcacctcaccagattgtaggtgaggcagcgactggccatgttttgcagccatcgatgtagatcccatgaatgcgggcctatctggtgatatgaagatgagaccggaggcggtgggcgagcttccccggccacaggttgcggagcaaccttcaacgtactgaccagcctgaccggggcttcaggactttcattcttttctttctttccttacaggcaggtgtctcctttttgggaaatacttctcacttttctctctactgagcatctaagctcgcctggtgcggaggaaggtaatgtcgttgcacatctacattgctcacaccggggagcatttcctggccgatccagtggcatttgcttcgtatgtctccactatcttcattgctatttatctatgttgatcagatctatctgaactccagctgacgcttgtgcatttctattagtcccgatgctttgaagtcatggatcgttcgaaatacatctattccgccaccacggcagatcttgatgaccgcccggggaaagaatgtcaaaatccaaacgcttgctaccgaggtactatattacgaatatcaatcataacctggaaatcggctaactcataggcaactatcgcagaatgagatctttgtatatgaccgacaatacgtcagtgaaccaggtgacgtcgagtttccggaacgacctcctcctgaaccattccgacccggtagtcccccggctacactgaaagactcgaacgaccttcaggcatggcggaacctatatatggcacggcgcaactgggcgctggacttgtccagccgctgtgggtcgattgataagaacctccgagaacataacgagcgaaccgatgttataaatcgcgcggtgggcgtggccctggagaatctcaagtcgcatgtgggtaacttagagcatcggttccaagaggcgcagacatgggcgaatagccttttagaagagcagcaggccgctttagatggttggcaacgagctctctccacactggataacataccggcacgtaaggatttccctcttcttggacgcccgtccacgcctaaaatggacgaggatcgaccaaccggaacgctgcgcgactttgtcgatgtaggcgaggtccaacgggctggatcagaggcagcaactgtgtcggcggactttgttgctagcgtccatgaaattgaaaaggcaatcggcgacatcgcctcggacactcaacaattagtagaagatgcccttgcctcaaatttcgacggggtggatgggtggctggaagaagtggagactattgcgaagaagatcgagtctgattatgagcatgtcctcggcctgccgaacaaccagaaaacgttggccaatatatcaagacttgcactcagccatacgcaagaccttcttccatcgctagtggagatcagcgtcgagcttcaagctgcgctagagcacgctgtgcaacgccgaggggccgcggagaaagcggccattcagcatatgcgcacgatttcctctcttgagtccagacttgccgacgccaatgcacgaatggtcaatctggacatagggagtaatgcctttgaggttatatactctgtcttccaaatgccaatggtatatgggtcgatccttatcgaatccgtgcggcggcgagaatggagtgagaagattaagactgactccttgacgctggccgaggagatggccattttgagggacgaagagcaacgtcgcagaaaaaagtggttaaagaatatgggggactatatgactgtgactgattccaccacaccgggaatcgaagtcaaccttcaaggtcaggatgaggaatggcccgaagtagcccggaaagagatcgagtattacatcgacgatttaaaaaccactcattccttgaccaacttagcggaagagctcacccagcagctcaaggcgctagatgcaccaactcggcaacaaagacgtcgggccaaagcgttcaaacaaggcagcgtatttgacttgagccggagctctatattacgcgccgatgactccgtccgtagcttacaagaagaaaagacaaagctagaagaaaggatcaaggggtctgacagtcgcgtccgcaaattggaagaccttttgcaccgacagagtcagctcagccggccatcgagcggcactttcggccccgacttccccggttcacctgcatctcctcaccctgatacattctctagacggtcatcaatgtcttcgaggagagtctctgcgactcagtctcccgaagagaaagcacttgtccagcgcattgttacgcttgaagcagagttggcggccgagagagatgcggtccagcgactccataaggaagcccacgccgagcggcaaaccaactccgacaagttccaagaagcccaatccaccaaaaaggatctcataggcaaccttgaagcgcgccagcgtgaatttgaagacgagcgccgatatctggactcagagctaaagaagttcagactccgtactgaggaaatggaagaagagcttgatcgacttatggacagcagagagcatggaaaacaagaacttgacgaccggatgcaccagctcgaagtcgaccttgaacatgctcacgccaattccgccgaggacgcacagaaaatcattgatcttaacgcacagattcaaactcggcaagagcgagaagaaggcctccaggctaagattgataaactcgagcaccaacaaatggagttcgagcaaaagcagcaggaaagttaccaagccctccaagttatcttcatgaacctctcacctgggggtattgtgcctgtcgaaattcccgacctaatcaaagccattgaagttctctccgagggtctgtcgatccacgccaagagtgcggaatcgagtgcatctcaggcaatggccgagagtaaggcccttgaagaacagattgccaaactcgaatcggaggcagaagagcggacgaagagcttcgatgaacgtgaggccgaattgtcgcgactaactacagagctgtcacgcgcgcagtcaaagtcgaatgacttgactagtgaactggacaaagagcgatccaagtacaattccttgcactctcaaattactggagagagtggctccgatgcgctgcgtgaacagatcgccgaagagcaacagaaacaggcagagatgtcgcggaaactggctgaagctgagagtgaagcccgaaatttgaaagatcaggctgcggaatgggagaaaaaatcagggagtccttcggagactgagaaacgggctgtcgcgcggtccgaagctcgaggtactaagtccttcgagctttctagtcagctcttcgcccaggttgagaagctgggtcggatgctcgaacaattggggttcaccatcattcagcaagatggtcagctccttgttcaacgagcttcaaagcttagtgcatcattggccctaggcgaaagcctcgcacagtccggtattgtatccctgaagccggataccgcgctcctagactggatgaaagccgaaagcctggaggatgaagagaaaaaattctcggctttcatggaaagcctagctcagttcgacgtggccctatttggtgatgttgttgtcaaacgcgtcaaggacatcgaactcctagctcgcaaatggcaaaaggaagctcgaggctatcgtgaaaaataccaccgagttcagagcgaggcccatgacaagatcgcctacagatcatttaaagaaggcgatcttgctctcttccttcccacacggaatcaagccattcgctcctgggcagccttcaacgttggcgcgccgcactatttccttcgcgaacaagattcacacaaactacaagctcgagactggcttctcgcccgcatcaccaagatcgaggaacgagttgtagatctgtccaaatcaatgaacggtatcgccccagaccgtcgctccctcggggccgccagcgacgtcacctctctggccgacgagaatccgttcgagctttcagatggcctccgttggtatctcctcgatgctgtagaagagaagcccggtgcgcctgccacaccggggctagcgaagagcacagttgcatcagcgcacgtcgatgccaagggtagcatccgcctcaagcgtgctacggacgagggcgctattgccaaaaccctatctaggagccttgatagccgccgcgagagttcaaattccaagcggggcacgcccgcgccgtcgcagcacgctgcggactccacgaccgatcttgtccgccttgccgaaggtgatgccggcacacagcctcgagaggctgctccgaccttcgacgaggttcgccgtaacctgccctccggcccgtgaaaagtaggacttatttatcttccgacttttccgggtctgttttttatataatttgataccggtactaatcgttttcctttggcttaggatcctgtctctgcatcggctcagccaaacataagtagcaccgcttctttaccctctcggccggcgtctgatcgtcgacacaacggccgatctcgtccgtgggagaaattgtggtctcttgactatcgactcgagggtggcgcaccatagactggttttttatttttatttatttataagctctggcgtactaagacgtggcattgttctttggtttcttttcggttcttcctggacatatacgtgtcccatttgcttttgacattgatttagtccagatacccagcaatgcaatctatacttgaatatattaatctacttgaagtggtatagggcacaagttgccggttgagctttatgaaacgtacgtcaaaatatactcaaacacaaagataatttacatagcaggtaagccgaggttgatgaatgaaaaaaaaaaaaaaaaagaaaagaaaattgaatagttaactagtctcaactggaacccgggtctaatccttccacgccttccatgccacccatgtcatgccaaaattggctgaaatccacgttctcgtcttcaaacatctgcttcgcttgcatcatcgcagaccgttgccgttccacagtgaaaccaccaggccgcgagctctcccattgaattagctcgacccaacgcaggaagagatcctccttgcccatatcggccaacttgtccttgaaggcaaggagttggtcgcgctgaacggagtctttttggctggtgggggtattatcatccccaacacgccagatcaaccaaccgtcagcatcagtgttaaccagcacggcagtgcggaattcatccatcttcacaccatcggttctgcgagtgcgctcaacaagaccatgagcacgaaccatagccgcatagtctaaattccaatcctcgtccacgagcaagtaaccagtcttggcgattcgctcgggagtcaccgcggcgacgatcttatcgcgacgcgcctcgtcgtcgcggatccaccggttgcgctctagctccttgctccaactgcggttactgcggcggacgatgatttctcgctcaaggaaaccgatggcacgacgccagtgcaacggccctctgacgaaattaacaggccacgaccacagcagggacacgaggaagtagtcgacgcatatatttccagtccgccacaggatgattcgtaccgcttctggccacggggtagacgtgtccacagtcatggaatttttgagcccgatcaatgttcccacgagcgctggatacgtactaattcccatgtacacccgtaggccaagtatagcagttactatcaggttgacgataaggggtacggtgaaggtctgtcgtttcagttcctctgctgtggtgtcgatgtgcactaggtatacttcgtccggggagagttgctcgacgaacggttgcaaggcttgcggaactttggtgaatggtgggatcgggcctgaggaggcggagcttggtgtcgaggctccggatgaagatggcgtcttgccgcgacctgaacgccgtgatgattttgccatggcggggttgatagatggatattccactgaattgctggatatgatctgagtttgagtttttctcaaaggcttaattaaaatgtgagtttgctgctttcgtcgaagctcttaaggatgtggcgactaaacgtgtcacatgtcaagataaagtgagggacatttgagcacgacgaggttacaaataatctcctgataaggtcctcagcgtaaatataagtaaagacaagttgaaatggcaagttgtcagtgcttgaagagtcgacgtaatgcggaagaaatccagacggcctaaccacattcgggaatgggagcgtatttacctccgtcatttcttcacggcgcaggagaaccgcgtctttctccttttcccctacctttctacatgtaaatcctctgcaggctgcaaggggtatttcagccatggctctcgatagaaacaatcgagtctcgcaagatagacaaccctcacctttccgacgcgcctcgaaattcgaccatcacgatatacctgcgaaactcccatcaccccctcaagatggtccgcatccacgacacgctattcgcccacgatctctagtcgatgcgtatcgagacgcatcaaaacacgcaatgtccgccacatacgaagaatataactatgtgaccacaccaagcccgcgatcgaagcgacaggcgattaacgcgttatcgccaatatctcagacctctcctcccccccaagaactagaagatgcatataggcgaattgatgaagatgacgccctagccgatctcgtgcgcgactatgactgggagccacaattcagcgcacgccccggaagccgaaatcgccccccgtccccccgagcaaagtacacaaacggcggtcgagcatctgccaatggacgatccatctccgacgctagttttggtgatgacctcggcgatcatcgagcgcgcaagagtagggactataccaaggatgaagagcgcctaaagcgggtcacgggccaacgctcgccggttttcagcagggcgcaggtaggacgggatgccctgacggcagataatctgaggagacgaatggaggataagactgaggtggatcagcagatgctagaggctgacatgaacggtgttccttcgccgaatgtacccagtggttggggtcatcgcgcaggttatcgacaagaatgggagagaaagcctacccagcctagtatctccgaagaggagaaggaaaaagcgcgtcgacgctggtcgccaatgacggaagaaatccaagcccccaggtctacgcatacctcccctcgttctccggcgcgggcactttctgctagaagcgcgcttgaggaacgcactgccaatccgcatatgcaggcaatgcgggaggactacggggaagcgcagtctggcccaaagccgacttcgcctactagcggtggcgagccaattccaaattcccctatcacagtattcaaaaacgcgtcattcgcaaggcccagcctcagcaagcgcgactcccgggatttactacgcaaactctcaaggactgaaacccccaaaattgaacatgtccagactcccgagccactcaaactgtttcaaagcaaagtctatgacaaaacccctcgagtaactggcgcgtggatcgatactcctatgacccagcgggtggctgagaaggtcgagcttcccgaagatctgacgaaagatatcattcctccacgcataacggatgatcctaaggatactgcacctacgaaactcatggaggtcgaatcgaaacccggtgaaccgaagcccgcgcagactagcgaaaaagagcctctttctgaaccactttctggaaagcagtcgaggcccgcgttgccgcgaccccatctacctaaaagtgcattggagacagtcattgaggatgctagctctggcaaagatgtcgaattcggagaagataccatcgagtctcttcaagcatttatggacgggccaggtgaacctaaaatagaggaagacgacgaagcttacgaaaaggccgtcctcgcccagctcgaaaacggcagttcaaaagaaaataatgcaggcaatttggattcattgaatgccaagctcaactctttaatgagacatatcgatgaggtcaagaaagggcttgacggcctggaaaattacgttacacaagacaccgccattgtgtcggaggcaagctccttaaacaagaagagcctccagtcattacacctgcacacaagcgattccggcacaggccgtggtaccactccctctgatggacgggtctacgccgcgatacctctccctcggctgtggacggggagcccacgatcccaacgccttcggccaaccaagctcggctggttcatcattatttcgctctcgtggtatatcatcgaatgtctgatgtgggaccggtatagtcatcccgagatatcagaaagctgcgaaggttactgcctgcagcccgatgcgccttggtatccctgggtaactgtcacgatgttgtggcgctggtcacatctatcgactattttcacgcctatttttgctctctgtgttgctttctctcgactcgtggcgcaattgatgggtctctcggatggctacgtcgacgacgcgccggaacttggaaatatcgttggcgaaatccgcatcaacggaacaccagtcgcgttcccttggctatcagcccccacgcctgagaacattgtgcctcaaccacagcaggtctactatacacagcagcctgtgcaaacgcagcctgtctggtcggttcgggacccgcccccgcagaggtgggacaatgaccagctgttgggggaggatataatggacgatgatgaatatctttagttctcaaggtttcttctaaattccccagagatttgctttgcgcgtttcgctccgaatcatcattttgctcatatgagctggactcgtgtgttatcatgattctaattcgtagtttgagatgctatctaatgtagcgattcattgctataatctctagttaacaaagtaataagtgatatagtcttctggatagccataaacgcccaacacgtgtaagatcgcgcgactggctctccagggctatcgcccatctatcacagaaatggttcgtcacgaggatcattaaaaatacaaatagggtattataaagcaaaaggaaagaagcaaaccatacaaaaccacttacaaccgcgctgtcgcgcgccattgcttctgcaattcgatctctccctccattttccaagcagtcattcgctgcatgagggcctcaacctgctcatcactgacttcacaggccttttcaatcggtatttcctttgtcaactgcagcttgaagcccaaccaggtgaggttcccggttgacacaatccggccagcaacagcatcacggcagaacccagcaaagctctcgaagaaacgatggctagctggcctatccatcatgagtataccgtggcagtgcggcataccctcgaacaattccgcgacgagaggcgcaccggcttggtggacacggcgcgctagaatgagatcttcgtctgtgagaccttcctcgccagtcgagatccagataggcggtgcgttcttccatagatcagccggggtagcgagcggagatactaatgggtggctcagcatgctggcgttgcagtagatgtcagcgcgaggtggggacgtgggccaaacatcgtctggtatgacatggaccggagtagtaaatagagtcttgacagctgggtcgttagggggcgcagccggcgcttcgagataatcgaggtatgcattgccgctggtagatggcatggagcgagacacatcgcaccagggagagatggttgcgacgcctgcgggcagttctataggcacatctttgccgtggaagcggatagtgtgagatgcgcggtcgagggtcaagagtgtttggaggaggaccagtgagaggttcccgccggcggaatccccagcgaatacgatcttgttggctggcacgggtttgtgaagggagcctggaggggggtggaggagtgagaggtatgccgttaaggcgtcgacaagcgcggctgggaatggattttgaggagcaaggcgatatcggacggataagacgggggcgccggtcaagtgggacaggcgtgcgacggggacgcggtggctgcagggatccataaggctttttttttggatgcgttagctatgcgcacggttgtaagagggtcgagcgacactcaccaatacgctcctccgtggaaatacaagatcatcatatcagacggcgattcctggcgcagcttgtggtatttctcctcttctgagagatcgggctccggtgttttctttccaaccccggcgcgataaccggtccattcagcttcgacggcgatagttgcggggatatcgtatgtctcattgccggtcttgaggtcttcaattgcgcgtattaccgcatcgcgcacgtcgacctcgggctgtgggagggtcactttggacacccacatggggcccttcactccagggtcgcgtatgccttgtctctgggttttaccaagtggagcttttgttgacatgaatgagcgaataatggcgacggttaattcggtgcgcatgtcctgtttccccttgacgggggacatttgaatgccatggaggaggacggtcttgaggattagcgggatgcgcaccagcagcaccttcaagagagcgagagtttccctcagcgagctcatagtgcgaaggtggcaactttgaggactggcttttgcgaaataacgaaaagggaggtgggagagaaagacctcaagatcttaaccttggaagatgctaaactggttttagttcctgagtggcgtcagtgccgaggtccgtggatcattggtacccacaagccctaattctgaattgcttcaatgtgtactccgtatgtagtattgatattcttttcgttgatttatgatatgattgatcattatatatatcatgacggctttgctttagtgtacttcatctgacttaccagtaggttgccaagctaccagattatgccggttatgacctgcatcacatgtacctaggtagcattactctgaacatatgatattgcagcattaagctgtggaaaaaaaacgcttataacaaccacaagacttgacatcgcgtggtaaatgggcatacaatgccgtcgtcgtcccttattagagtaccaccccaaccaagtatgtagttctgtggcttcatatccgatgacaacagccgggatatttctaacacgatatcagaacgtgaacgccctcatattcctaggaatatcatattcaatcatacagcattgatctagcagatgtaagaccagaaccaatcggctgccctaatccggacttgtgatagatgactaatcataagcctcaggccaacattttcatgatcttcaactctaaaactaccatttgtttcaggccctttggtttttgatgtcttcactttgcacgcctcaaggcgaagcttctccgcctttgtactgtatgttttactgagcagaatctatcttgtggatgcaatctttcatgtccgctttccccatcgtcccattctcatccccccactcacccactactcaatttgccccatcgcctcgggacgtgttcatggtagtaagtcgggcggacacgactcaataacttgagagatggaggagagtacccttttcggcgacgacttgccgcttccaccggctcgacttttcgaacgattaggtcagttacctggctatacctgggatcagacgatcgaaccgtttcactcgacatacaatcactggcatatctcaggataccgtcatgccctggagccggatgttttaactcctcttgcaaattcctccaatcccgcttcctccggaccgtccagtctcacacgcttctccccgcgcacagaagctcgaccatctgcccgtgccttgcgaagattgagcgttagcgaaaccagcagtgaaatctcattatccaaccaacacagcctggagacagatcaaacatggttaccggtcatcgcacgaatctccacgaacattatccggctcgaacgagagtttcacatgcttaggtcaattgtacaatcgtcagatccggattgcaatcatacaatacgaccagtcgacttgatcaggctacaacccgatgacgggcactcgaagacgctgctggttgcgatttttgagtctccaggccatgataggttgcgagatctggtcacattcggccctgcctcatttgccgcagggtccaaaggcgaagacaacaatgtcacccccagcgagcaggtctccttacaagccttttttgatttcgcaattggagcatgcgattgcttggagattctacactatggcctgaagacagtgcacggcgaaatcagaggcgatgcgttccatttttgtgcagagaccggtgcagtgaagctcgcgaacaccggaaacggtgctaggtcgtttgataacgttctcagcgagggctggtcctccgtttcgcgcgagcttggggccaagtacaagctgcaatttattgccccagagcagactggaaggatgcctacagagccagatagccgcactgatatttatgcgctgggcctctttttctggtccatgctggttggaagactaccatttgaaggaaccgatcctgttgatgtggtacaaaatgtactaggcaagagattggtaccagtatctgggaaacgaatggatgttccagatgctctctcggctgtgatccaaaaaatgacccaaaaggtggttcatgatcgctaccacacaatctcatctgtgaagagagacttgaccaatattgctaaattgctcggtgatggtgacagtgaagcattgagcaatttccaagtcgcgcaaggagacgtgtcttcctttttcactctcccaacgtacatgttcggacggcaagaagaatatgacaagattatcagtatcatcgaaaaggtgaataagcgtcaggcggctgccttggctaaatctggaacccaaagtcccggtactacgcacgctctcacgtcggcttcgtctctctctgaaagccgtatcgaaagcctcgagtttgcttctgtctctagcgattctggctccttccatatgccccctcgatcttcttcgaacgtcaccagttatcatatcgcacaggtaaacagtcatgaatctgtgccaggtagtgagacgtcgttctccactcagaagcatacaattgtccccgaggtgtatagtcaaagcccaggagcagcttccagcagagtcaagagcccatcgcattctcggtcttcccataacacagaccgcgatagtcaccactccatcggtcctcccagccaacaatcaacaaaccataccgttagtcaaccgggatcactgcattccttgaataaaccgaagaatagtgggaagtctcgccgcaacgagcgttgtgaagtgattacaattagcggtccctctgggattggaaaaacggaccttttaaatcggatacagccaacagttcgcaagatcggatgcatagcaatcactcgtcttgaccgagccaaacgtgtcccatttgaacctttcgcaaaactattggccagtcttttgcgccaaatcttctccgagcgcgatgtcaccacagattatcacaacagtgttagaatagccctgcgaccaatgtggcctactctgcacagagttttggatcttcccgatcagctgatgtcccctggcgcaaaatacagaccagctgaaaaggccaataactttctcatgccaactaagggtgagccatccaagcatgtcaacatccccgggctggatcaagggcagacttctcaagatttctttttggcaaatgccgcctcgaagaatatgcggctcacggagacattccttgagatattgcgaacgctgtgtcatttcaaactcatcactatttgccttgatgatctcgaacatgcagatgacgaaactttggacttggtaatgaaaattatcaaagcaaagctaccatgtgtcctcatactgtcaagccgcaaggaagagattccatctgcccaggtgaagtctttatttgtggaagatttaccggcgatcacgcgaatcgtacttgaccccctcgaagagcagcatgtcatggaacttgtagcagcgacaatgcaccagaaacccgatcaaacattgacgccactatgtgcggtcgttcaggagaagagccgaggaaatcccttctacgttcgggtaatgcttgaaacttgttacagaacaaactgtatttggtattcatggaaggactcaaagtggctattcgacctcgaccgaatatttacggagtttgtggctcctgtctatggcgaagggcttggacttggatttctcaccaagcgtcttcaggatattccccaagccgctcgatcaatcatggtctggggagctcttctgggcagcccgttctctttttctctggtacaaaagctcttgacaagtgaatttctgtattcgagcaatgacgacgactattatgatctcacatcaccccaagatatcacacttatcagacaatcagaaggtgatatagttgttgggttgcagtttttggttcaagcaaacctcttaaacacgggaaggaccgacgatgagtttaggtgaggcatctatgtttactactagcaaaaactcttactgattctcctaggttcggcaatgaacgacttgcacaggctgctctttctttgaacgagagtcgaaatgtagagaagatgcatttcatcgtttcacaagtgctgatgaaatattaccatgaccatcgcagtcgctattcgatggctcatcatgtggcacttgcgtcgcggactatcaagtctcgtgtcagcagacgccttgaatatcgtcagatcttatgggatgccgggcaaaccgctttccagtctggcgcgcggccctctgcactttggtacttccgccattgcatcgctttacttcaggatgatatgtggaatgatctcaaacccgacgtttattacgatgaaaccatgcggctatttatcacgacctcggaaatgtcatcctctcaaggtcacaatgatgatgccctccagttgatcaacgaggtgtttgttcatggcaaggacgccttaagcaagtcgagagcctggaccattaaggccaaaatcttcgctcagataggcgatcaccacagctcgatggattcacttctcacctgccttgatgagcttggtgtgcatcttcgtcaacctacaacgtatgaggagtgcgacgctgcctatcttcgtctcaagtcctatctcgagactgccgacctgagctctattgcccaaaagccagtttccaaggacccaactatagtgactatcggcgcagtcatggcggaggcgatgacagtcacgtactgggacgatgcattgacattctatcgaatggcgcttgaagtgatgaacattcatattttcaagggtggattcacacagatcgcaataggttgttcccatcttgccatgatcgcattaggtcgctttaaagatatcgaatttggcacaagacttagcgacctttccctagaactgctcgagctctgccccgaattgtcgactcagagcagaggctcgatcgttcataatctctacgtcagccatttacgtgttcccatggcatcaacactaccggccttggaagcttctctcgaggcttctttctcgatgggtgacccgtatcttaccctgatcagcatctcatcaatggccatgactcgattgtacctaggccaagacatggcacagctagaagctttctgtgtggagacccctgccgaaattcccaagtggcaccaagatacccgcggtggggctagtctcattgcagtccagcaagtttcacgtgccctgcaaggcaagaccgaattccgatctgccgatggtatcatgtcagacgccaatcacaacacctctgactatatgatgcatctggatgttcactccagtaacgctgacaggccccgtgacatctactggggtcttgccatggttccactgttcctgttcggtcaccacaccagagcaatccaagtaggtactcaacttttgttcaccaggcacaggctctggtctgcacgtgtgtcctacgtgatttgtttctatctggcagcctcaatcctcacttttcataatgacaatccctcccaaggatacctcgacgacaagatggacgcactcatggaatacaaggccgagatcgattttgctcgagatgcatcggaaacaaattatggcatgtgggctctaattctagaggccctgatcgccgaggttcggaatgatcatagcgctgccatccagggcttcgagtctgcaatcgaccactgtcaaatccatggttggccccttgaggaagccttggccctcgagctgcagggtgagtttttggttagacgcggagcaaagagggcggctcgtgctgtaattcaagatgccatcgcttcatggagctccattggcgccagtggcaaatcatcgcagctcgctgagaaacatgaatggttactcaagacggccacatcgtccaaaactgtggacgttggctgtcagactgttgattcacttcttgagatcagccgtgatgttgtgcaagaagagtgtatggtcccccagcagatggaagaggatgagaggagacaacaatggatcgagcaaaacggtgttgctgctggggaacgatctctagacatatcaagtgtcgggttagacattattgacttatccagtattctggagtccagtcaagtcatgtcatctgagcttcaaattgacaagcttttcacgaaaatgcttgagatcatcttggagtcttgcaacggttctgatttcgccatcattgctactgacttcgatgataacaatggctttgcaattgccgcagcaggtgattctgaaaagggccagaaatcattcccaggtggtctccctttctcggaaatggaagatcgaatggccttgcatatctcggactatgtcatgcgcacaaaggaagaagttcttgttcacaacgttctcgaagatgaacgattctcaaacgtcagcgagacctacctggcaaatttccccgcgggtcggtctgttatcgcattgccagtcgtgcaaggagatcgccttctcggcgtcattcatctggaaggaaaaccaaattggttcacgcagcgaaacgttgtggtcctgcatttgctttgcaaccaaattggtatttcgttgtccaacgcgttgctcttccgtgaaattcgcaaggtcagcgccaagaatgcttccatgattgaatctcaaaagcgtgcattggcattggcacgtgaggctgaacagaaggcaaagaatgcggaggccgaagccaagcacaacgtgaagttaaaggaagacgcagcaagggccaagtcgattttccttgccaacatttcccatgatctgcgtactcctatgaacggcgtgattgggttgtcggagctcctcaagggcacttaccttgacactgagcaagatgaatacgtcgaatcaattcgtgtgtgtgctgataccttgctcaccctcatcaacgacattctcgatttctcgaagctcgaggccggaaaaatgaagatctccacggttccactcaatttaaagcaaactatatcagaagtcatccgggctttgcgatacacacatcgtgacagaggcctagaaaccatcgagaatcttgataaggtaccaccagagctcgttgttcttggcgaccctgttcgtctccaccagattttcatgaacctcctcagcaacagttacaagttcacccctgccggatcagttacggttaaagcaagggttgcgcgtgagggtaaaggtcgggttcgccttgaatgttctgtcaccgacaccggtatcggtattccagacgaacagaaagctcgccttttccgaccattttcacaggccgatgcatccacggaaagatcatatggcggtagtggccttggcctgtcaatctgcaaagctataattgaagatgttctcggtggagctatctggcttgaatcgaaatctggagttggaacgaccgtgacattccacttggtcttcaacaaagcaccaaagaagacggcggtcaagactgcatggtcacaagatctggaaaatgcagacaaagaactacgtcggtcctcagctcgagatctcacgcaaatccctcgtgaccagattcgagtgtgcattgccgaagacaatccaatcaaccagaagatcgccgtgaaattcgtcaccggacttggtctccagtgtaacgcatacagcgacggcaaacaagctgtcgatgctctgcgtgcaagctccaaagaaggcaatccattccacgtggtcctcatggacgtgatgatgcccactcttgacggatataacgcgacccgcgagctgcgccgggatcccgatccaaatgtaaatgaagtgctagtcatcgccatgactgcaagtgccatcgaaggcgatcgcgagaaatgcctagaggctggcatgaacaattatctccctaaaccggtccgctcgccgattttgagcgaattattggacaggtatctcgccccaatgccgccatcctatcccaagtctcgtcttgctatccgagaaaagcgttcaaaagcaagtattgacggcagcgccggcacacccaccagttactcctcttcggcttcagatgagccgaagccgttgtcactggaaaagaaatgagtccatgcattttaaatttatacccaagttcgcaaagatagaagttaggcgtcatttgggtcgatgagtttatctctctttgactttttgttttttgcctcgtcgttcaatgcattggtatttcctcctttggtatttcttgtggactttattttatgataatcatgcacctttgtttcccgctcataatcatggtcaatggcatacttcattggatatgatccgatacatattctgaattggacatttgaacataatgcattatttacgtgtagaacatcagctatatacataattctcatgatatcagacaaaagcctaagcgcgacgaccaaagacgcggaaacgcttgacaccgccatcaggaacaagagtcagcttgacgtggctgaacacccgagtatcctcaccaccagcagtgagatcatcggacccaaagacatgctcggtgtctgcctggcagcgcttatcacccttgacgatctcaacccagttggcatcatcagccgagggcacaccttcaccagcagtgccagcaaccagaccgtgcacgcgcacagcgcgagggaagtttccacggaaatccttggtgtcaacaacaaccttggagaccgagccaggaaggcccagcttagcaataacccaatcgacgtgaccagcagcgcgcgagcgagcagtctcccatccgtcacccatatccttgccacgaccaggaagcagaatgttagatgagggtgtatagtgctcgtcggaggcagcaagagtcacaccgccattgagagcagacgagagctcttcaacgggggcagaggcagaggcagccggggcgggagggggaatggcgtggccgtagaggcggagacgggcgaagccaccgtcagggtacatcagaagacggaagtgggtgtagggggattggctgatctcgtcggataacttccatgcgcggcgctgggagggaccgcaaggtgaagcgggtagtagtgtcttccagccggcgaagctggggtctgcaatctgggcatctgtaatgccgctaccttccggtgcgtaagtagcttgtagctcggccttctcgccgtagttgccgacgaagaatgcggtgtctacttcgacgccgtggatagaggctgcggcaacgcccagcttgatcacggcccagtcgtagggatccgggttatggcggcgggtctcccagccatcgtaccaggcaccggtatgaatgaagacgccggggcgtgagatggcgggagtgggagttaggaggttatcaactgaagcgaagtagtcgtttgagcaggccaggaccttgctgtttaggttgcacgaggccaagttggtagtgtgtgcgaacacctggtcgatatcggcggcggcgacctgcattttgggtagagatttatggattatgcgtttcaatgaggtgtttaattgagaagtcgaagacgagggtgagtgtatacttaaatagcagagtggggggttatcgataagagccttgcccctcgaaatgcatttccattactcgatagtctccattcctcttcggtcttcgtctcatcagagccaatcagagcctatctttctcgatattccgttggagtaccgatatttggcgctaagtccagatccaattccggtttgagacctttcggagttgatttcggagttcgatcgttgatccactacatcaaacgccatatcggaggtctccgatgggcgccgttatctgaatggaagtctctcattgactagaaattatagtcacagaatccatagaaaccggaggaatggaagatgttcaatttgcgcctactgcgtctaccgtggcagtgagaagttgaaagaactttcctccgcgacctgcacagagagcccggagttcatcggaattcaacaattcggccaatgagacttgcaattggttctgctgtgctcagtcaccgacgacaataggacaatagccgccctgcttgtaaattagcagacggaagcaaaaggaacgggaatcaagtcaactgccatcgtgtacagggttctacaatgacacagctaccaccgattcccatatatcccgaacatctttgttcaaaggggacacccgagtcattttacttcgttactgttgcaatcttgaccgacctacttgtgtgacactcaacgaattctccctcgagtcagagattcagggttaaaatcaggtaatcaatttattgccttcagacaaagcccacaaataggcaagacggatcacgtgctatgaaacatgaaatattacccaggtcattcccaggctatgagagcagatatcagagttaaaaattgacaaagtatttcagcacaagcacatcaaaataagctatgaagcttctagaccaacgccagcaatgccttcgtatcattcaatatgatgggcgcaaacagcaaaagaaaaggaaaaagaagagaagaaaagacatttttgtcgctatcccttcccagtggtcttcgttgcagcattctccagggccgtatatctccactcgtactgtgccattgctcttttgtcgcttgcagaacggccttcgttcttgccactcaaatcctttgtgccctgcatctgtatttcccatcccttgaggattcgagcctgggcttccgcgatcgaagtcaggtttgagttttgtgaagccattcgttcgtcaatcgtggcatggtacgacaatttggcgcggaagagggccatttcgcattcgtcgtacttgatccctttcgcctcgggcaccatgttgtcttgtgtactcttcggaggcatctcggactggaccacgagagaaaaagggaaagagggaaatattgtcggtgcagcagataaactacttttatagccgtgttttggtaatggaatgtgttgggagtttggataagtaaagacaacggttttatgttcaaaggaacgaagtatgtatatctgtccaaacacaaagcgaatgattcaagagcgatgtcacgcctagaatacacctgaagcaaacatagaaatatagtggcgaaagggaaggttccaaattaaagagctgtaggggaaaatgcaagagaaatctcgatcaaatatatcatgaccaggtcgtgttcaccgtcactgtcgaaaggaaacatggaccctccaatacccgacatgacggatgtatcacactcaattcccccaacgctgcgcagaaaaggggcatggctacggtcaaacccggaaagagaaggagatcaaaggacacatgcacatacacacataagagacttctaacaagcccaacggtttcttcacgccaaaaatggttatttgtgcctctgaaaccgtactcgaagtaggccctacccatcccgtgttgagcggcgatgacccgtttgcttttggcaacagtgccatctgtctcgtgatgagaagccgagccaatcgatctaagttgccgccttacctggagcgttgggtgcaggagccatggtaacaccatgtttgaatcgtgcatgactttaggaattttgctagaacggtcgagcatcaatcggcagatgcagtcccgtctcggtccgtatggccgtgcgcacatctctgtgtatcaggatctgtagattggaagacatccgtgtctttttcagttgtactccgtacatttacatgttctttgatggcccaatggctatatgataggtggctgtttgtaccaaacaatccgacccggatcttttcagctgagagacaatcgaaaaagcctaccgcttctataccgatgccacgagggtcaattagaggcaagcaaccggattacacgcggaatagagttgatgtagcctgcccgtcatttccaccctgtcgtctctctcctccattatctttcagaagatctcaatatggaccattgttcgggtttcaatgtagagaagatgggaagagaaaccccctcgaggtcattggtatcaatgcagtgtttggcccagactataaataattagcaattcgcaagcaccattggcttttctactctacaatcagagacatacatacatcttcagtacaaaggataaaaaagaaaaatgcaaggccccatgaacccgttgaactatattcttcagccacgtagtctcttttgtcccttttctggcttgcgtcaccatccaattcttccaaggataaccatattagggctgcagagcacccacaccggctcatttgtgacacttgagaccgcaggaagcccgttgaccatttattttattttcttaacaaagcacatgatattatttgaaggctgaacccattgatcaggatagcctcccttctagagtgggctaaaaaagggacggagtgcaaaagggtcataactcggtacctgatttgtttgtacaacgctgcaggctgaaatttaggggacctatgggccgtgattgcattctggactggtggcgatgcatctcggagaaaagaaaagtattccgtgaggtatcccaacgggaaatgggccagaccgagaaaggtctgggcacttagggctcgtgagatcatctgatatcaaccaattgtagatctacaccacggacattgaagccaacactatccttttgggagtcggtaaggatacaaagcatctcaaagctcatgtttctggtgtctcatgtacgtttgagacgatagagggcggaaattgtgtaacggaacaagcacccctccggcgggtaggcacagggttatatcgggtccgacgcgtttcaaccgttccacattggtgcctttgtcttgatctatgtgtaatattgagagaggtctgaagtttgtttagattcgtcattgattgatttcaagatgaccagctctaaattttcactctaaatccagagagcttggagctagaacaaagacgggaaaggcacatcaaaatatattatccctttaataataaaaatggcttccctactactgaatgtttatcgattagcactgccctcctcattccggctcgccgccgctctcactttcttggccttctgaatatccaacgacatcttcactgggtggactcccggggtctcaaacaccgtgttgatctcctccagagacaaacggctagtctctgggaagaataaccacgacaagacgagttggatcgagttatacacgatgtagacgacccaaatcttataccccactttttggataccgacaccaattccgtaagtctgcgcggctccggcacctccttgaataagaccgtaaagacccattcccttggcacgaaggggtaaagagagaatttcaatggggtacaggttgtgcatggttgcaacaaatgtcgctgagaaggtctggtataggaaaatccagagaatggtgagcgcagccgctgctgtagtggcatggagactgtactgccacgaagtgatcgtcgtggccgtttggaaaacaatcatgctgataagacccacaaagatcatggttcgtctgcggaacttatcgactataagcgcgccagcggccgtaaagacgaaatagactgcggtggtaccgatgttgataccgagtagctgcttctcgctcttgatgccgagttgttgtaacgaaggaaccatctaaaaaggtattagtgactgagttaaggtggcctctgatctaaacacccacatagtatgtgataataccacctccattccattgctggaagagcgagtataaaaacaaaaccagcagtcggaaacgggccgccttggtgaagaaaacccgatagtcccaggcggccctgtagcccgtctggtcgttctcgagagattcctcaatctgtctcaccacaatgtcgacaattggctcatgtatgtcggtgctagtggtgtggtacttggcgatgacttccttggccttctgacgattgcccctcaagatataataacggggcgactcgggagttataaggtatattcccagacagacaatagtggggaataaagcctcaagaatgagaggaacacgccaggagttgttgccaggcaactcggtcagtccaatcatggcaccaagcatagcaagactaccgacctggaagcatgcgccaaaaaagcccaccataacaccacgcaggtgaataggcgagatctcgccaatatactgagagcttgacatgagcgaagtgccaaagcccatgaagaatcggccggccatgaatattggcaggttcgttgcgaggccttgcatgagagatgcaaagatgacaatggcatttccggtaaaattgattccacgacgaccgatcacgtccgccaaacccataaagggtgctccacagacgacaccaatctgcatcagagcattgatcaagccatatgtgccaccactgctcccaaaaccgaagtaaccgtgccattgatccaaagcattaataccgctgatgacaccccagtcgataccaaagccagcttggttacaaccatgaataaacatgatgaggcccagacggactccggtccacgatcggaggctcagagaatcctcagacagcttccacaggtcctcctctgtcactcgtgccagaacaatctcctcaatatgttcccgattctcgcccttgcccagcttagcctccgcatagccagcatctgaggccattgttgcgttttggggaactcgattgaaggaacttgaaagagtatggatatgatcggcccagtatggggttgagaacccttgagctatcaaattcgagccaattttgtggatatgccggggtattattgcttcggtgagtcgatcgcgaagccaggggcgacaaagtaatggtcggcatccataatgttgctaagcgacctatttcgccacggagaagacatgagcttcgccagattaacttgtggcgtgatgtaactgctagaatagatagtgattggtgagtgatggatgtcacgttgtacattttgtacgccgactcctgaaaagcctctcctcgccatgtaccctagggatttcccaccagtgagacacgagtgcgggggagactagcatcaagttggcaggagtatcgcttaaacattttcgcaatgttagtctggagtggtcgcatcgaccgcagatcacaaggacgatgataatctgggggagacatttagcctgaaatccggggaacggccggggaaagagttagatccggcgcttgttttcccgaatcctttgcacttggcaagtcgtatcggcttcttgactatcccactagctcctagctcttttgacttatccgattcagcgtctttcagcatgttctattcaaaagtggcggctgacggaccgaactgccgtcttgttctccagagctagtccatattgatacatccacccaacacagaccagaccagacccattgaaaatcattgaacatgtccgaactatggtaccaacagcctgcggaagactggaattccgccctgcctgtcgggaatgggcgcctaggcgccatggtgtatggacgcaccgacaccgaaatgctacagctcaatgaggattcagtgtggtatggaggaccccaagatcgcaatccacaagacgcgctcaagtacttgccgcgcctgagagaggctatacgtgcggaaaaccatgtcgaagccgaaaagatcgccaagctggcgtttttcgctaacccgatcagccagcggaactatgagccgctgggaaacctgtttttggatttgggacatgatcctagccgtgttacaggctatcggcgctcactggatctcgaaagtgctacagcacatgtcggctatgagtaccaaggtgttcgcttcaaacgtgaagtcttcgccagctacccggatgatgtgcttgcaatcagattgcgctcgtcgagcaaggctgagttcgtcgttcgcttgacgcgtatgagtgacttggaatatgaaacaaatgagtggcttgacgatgtcagtgctagcagagactccattaccatgcatgtcacgcctgggggcaggaacagtaatcgagcgtgctgcgtcgtgtcagttcgttgctatggtgatgagagtacaattaccaagattggaaataatctggttgtaaactctggtgataccctgctggtcattgcggcgcagactacatttcgacacaaagacattgatcaaagaaccaagcaagatgcagagaatgccttgggtctctcgttggaggatctccgctcccgtcatgtttccgactaccagtctttgtacgaccgaatgggattacaacttgggccgagctctcctgaggtcccaaccgaccaacgtctgaaatattctcgggatccagggctcatagcactctatcacaactataatcgctatctcctgatatcatgtagtcgggatgtacacaaatcgcttcctgcaaacctccagggtatctggaacccatccttccatccggcatggggctccaggttcactactaatgtcaatctccaaatgaactactggtctgcgaatgtgtgtaacctctcggaatgtgagcttcctctgtttcaattactagagcgcatggttgagcctggcaaagccacagctcggatcatgtacgggtgtcggggatggacagcccattccaacactgatatatgggccgatacagctcccgttgatcgatggatgccggcaagtatctggccgctcggtggtgcgtggctctgctaccacatttgggaccatttccaatatacatgcgatgaagagttccttcgtcggatgtttcccaccctgcgtgggtgcgtggagtttctcctcgacttcctgatccaagacaccaatggcgtatatcttgtcactagtccgtctgcttctccagaaaactcattctacgattccaaaggggaaaagggcacattgtgcgaaggatcaacaatcgatatccaaatcattgctgctattctggatgccttcgaatcatgcgcaaagagacttggtctcgaggatgcccttcttccatcagtccaagctacaaagtcccgccttccgccaatgaagatttcccctgcagggtatctacaggaatgggccgctgactatgccgaggtcgaatccggacaccgtcacatgtcccatctatgggccctataccccgggaatgcaatcacaccttcacgaacccctcagctggcagaagcgtgcggggaagttatacgtcgacgcgcagaacatggtggcggccatactggctggagtcgtgcgtggctgctcaacctgcacgcacgcttacttgaagccgaagaatgcagtgggcatctagacttgcttttgtcacggtctacttggcccaatctactagatagccaccctccattccagattgatggaaactttggtggtggggctggcattatcgaaatgctggtccaatcccatgagcctggggtaattcgcatccttccagcgtgtccgagaggctggactggatccatccggggagtgcgggcacgcggtgggtttgagttgaaatttaatttcaagaatggccgtgttgtaggtgaagtgactatatattcggagcgtggagagactgtagttgttcacttcaatgagttacaagtagagattactggtggtggtgagcataagatctaaacatgatagatgtgtcaatcaatagatgtcaattgccaattatatgaaaaagacatgcttattcttcaatatcttaaggtacttccgtactccaggtgttggcctcttccccaccgtcgcctatacccacttcgtctaacccctgcacttcctaaaccgtcacggagcaaatacccgcatctcccagtctcggggtaaattgaagagaacaatagcactttatccggatcttcttttgtgggcctcttcgatgagagctctaagctaagaaaataaattatcaacttgttcataattccgccagtcctaacataggcaacacagcaagatggatttgaactcagtgcaagatctcaaggacgtgctccgacccgacttcttccatggctacgccacagcagcagcccaaatagaaggcgcctggaacaaggacggcaaaggcgtgtccatatgggatacattcggccacacgccagacaaaatcgcagatggaagcacagccgacgacgctgtccgagcttacgatttttatcgtgaagatgtagcgctcatgaaatcctacggcgtaaacgcctaccgcttctccctatcctggccccgtatcatccccctcggcggccgcgacgaccccgtcaacgagcaaggtatcaaattctactccgatcttatcgacgaactcctccgcaatggaatcacccccttcataaccttattccactgggatatcccccaggccttggaagatcggtacggcggcatgctgaatcaggacgcctacacgccggactttatgcactatgcccgcgtctgcttcgagcgctttggcgaccgcgtcaaacactggatcacctacaacgagccgggcgtctataccctcgccgggtatgcagcgggcgtgcacgcgccgggcagatcgtccttccgtgagcgcaatgccgatggcgactcgtctaccgagccgttcaccgtcgcgcacactgagctcgtctcgcacggccatgtcgtgcgcttgtaccgggaagagttccagccccagcagaagggaagcattggtattaccctgcatggcaattggtccgaggcgtgggatgaagaggacccgcgcgaccaagaggctgcagagcgtgcgcgcgagtttgagatcgcttggtttgcggatccgttgtacaaaacgggtgattatcctgcctcgatgcaggcgcagcttggtgatcggttgccgaggttcacggaggaggaatcgaagcttgtgtttgggagctcggatttttatggcatgaatagctacacgactttcttcgtgaagcatacgacatctccgcctgacattaatgaccacaagggaaatgtggaaatctgcgatgagaataagcaaggtgtgtctcgtggagaggaaagtgataccccgtggctgcgggccgcgcccgggggattcaggaagttgttgaactggatctataaacgttatcagatgcctatttatgtcactgaaaacggtaccaccgccaagggtgagactgcacccatgcctgaggttcttaatgacgagttccgcatcaagttcttcgagggttatgtcggcaatgcgttggcgcgggctgtgaaggaagacggagttgatatccggtcttactttgcctggacattcactgataactggggtaagtagtggctggtttcttcgcatgaatatggaattggctaatactttcagaatgggccgctgggtatgcggatcgcttcggttctacatttatcgatctcgagtccgaagaaaagactcggtatcccaagcagtctgcctattatctggacaagttgttcaagcatctgattaaagacgcatagaatattgggagacagacaaatagttaacataaatgaagtgtctgtcatatatatatttgcggtaaacgcagcaacaccaccacctatataggcaatagatatatatcgtaagacaagtcatacatcggggtggactggagattactgtgtcaccaccaacatcctgtataacaccatcgcgtaaagcttctatttgttggaatctcgaattatagccagttagggcaagtcattgcgatccttatcagctagaccccgaattactccaactgaggggaactccgcctcggctgttgatattcctcttaaatagctggagatagccctgatagccttgactttgactatctgtatagttacctgcattgtgcatactcaacatgcagcccaaagatgagccaatcaagctgaagctccagggatctcctcgagaagtaaattctgccaatattaacatctgcatatgataactaagaacctcaactgactcaattaaattagatcgggctacagcatggccgagggttacgggaccaaatccacagccagatatctatctacgatgccatgttccagcatacctcaaatctagcctggaaagatgtgcgcgaagtcgcaactgaatttcagcccacacttcagaacctaacgcctgatctgtttacggagatggagggtatcgcagagggcgccgggttagatgtgcttgacataattgcgctgaactgccgaagcgagatagcgctaggacgattctccgatggctgcacggcactaagctggaagaaaagcgaggcgacgcgagtgctcgcgcagaattgggactggacgcagactgtcaagaagaatctagcgatggtatcgattgagcaggttggaaaacccactatctatatggttaccgaggtcagtattcctgtataggtctatattctgacatgtaattaactattctcaggcaggaatcgttggcaagataggattcaataccagcggcgttggaacttgtctcaatgcaatccgcgccaaaccgatgattagcagcaagatcccgatccacgttgcgcttcggttgtgtttggaaagtacttctgtcgacaacgccgtgaagaccatcgagtctctgggtggtgtcgcctctgctcagcatatcctttgtgcagacagtaccaaagccctagggcttgagctgtcgccagttggagacaaacatatctccgaggatgcatcggggattatcggccataccaatcatttccttgagaaccgctatgtgaatgagccaccgtggctgtccgggtcacctatccggctcaagcggctaggagagttgacgcaggagttaatacagggtggtgtccagggcgacactattaccccggctgtgttgcgagaatatgtcttctctgatacgtataaccagcctcagtcaatatgttgtcaggaggacccatcgcgtcatatctcaaataggagtagtactttgttcaacattattatgaacttggacctggagaatctcggcgcagaggtggtctttggccggattgggtctggagaggaagggcctgtgttgacaatgccttggtgaatgaatatcatgaaagaccgctggataggactttgtatctgtgtcttagatcataaagaagatgacaagtctttgtgctggaatccttttattagatatcaatattcatctgtgtttagaatacaaagaatatgaggatagtctttgttacattgtttctctttgaccatggactcaaccataaaagaggcctcatataccaccttcagatgtctcatcatccaccagctactcattcttcaggcaatcggctcaaaggtcataggcccaggtaagcctcataatccactctattcaataccatctagttcctaccagagtcatgtccggtcgcagtttccacggtacgtacgaagaagagcgccgctacttcatgaccacactgcacgctcagattgacattctcaaggacaactacaagggaagccgacatatcgttatcaagtctttgaatcttctccttctgcgagtcgaaggtctgcgaatgtccggacaagctcattttgaccacgataactctagttggacagtcaaatgtaacaggctctatgaacgggtgcagtatttcagggatactcttgtcaaggaccggaacagcacccgcaaagttgccaatgaaatcgagagtatgatgatatttttggacttttgtgtccccgcggatattcaatacaggattatgccagatcgaggggatcgaagtggtgccccatcgcccgagcctatgtgttgattgtatttagatcaatgaagtgattcagttggaattcgttgccgataatggtatatgtagtatcatagtaaaatggcgtacttatgagatttgtaatataggccaagcctagatatttcttttgccgaatcagctttgcaatggaatccctctcactggcgttttcagctcccggagatatgcggaccctatctcaaacgtcatcgaaagtgacgatcacgccaatttgtgatttgtagagaacattgagctgaaaaaacgcaataaacgcaaggatcattggccaccgccctcaatccctttctttgggtaatcttttcgccttttcttatgagcatctcctataactgccatggcctcggcaacaggaatccctcaagctcacccagtgacaattgaatcgcgagaggatgagcctctattgggccgtccaggcgatgtcacacaaaaggccgaggaggccatttatcggaaccttttcacaggtgagcgtgaaagctttcgatcgaaacccacgactgactccaaaatcaggaacagcaagtgttgcgcaagcagggatttggattgtaagagcattatgacctattcgaaaagatcagagaactaatgaacaaaacagctagccgcgttggtctggcaaggtgtcttagcccaacccctctcgctgttcaccccgcatccagtaagtatccatgtcgctgaacaaaatatcccaaagacattgactggaagacattcagctactcggcagctctgcccttcttcttcaagtccaagcagctctgattttgcaaccaaccgccaccccgcaacaaaagcgtacgggtactcgcatccactactcctttcaactgctcagcgtggtgctttttgtatctgcttttgttattatcgaggttaacaagggctctcatccgcactttgtttctcctcacggtattctgggtctagtcacttacatcgctatcgtgctccaagccgtggtcggtgtcatccagtactttgcgcccgttaccgtactcggtagtgtggacgccgggaagcgcatttataagtaccatcgctggagcggttatgttttgctactgctggagatggcgactatcgtggcggcgacgcagaccacctacaacttgatggcgattcatattcctctttggggtgtcgtggttgctgccatttttatcctcgctggagtcggtgcgaggattaagaagcataaattggggctgtaagatcgggattgagacgggatctgagagtactgcagactatttatgaagcgaatgtatgaagtttccgatgcaaatggagcaccagcctggggcagccgggtatgtagatcgtctatagccgtggaccagattcatgtgagtatccaaatctcgcatgatcatactcgttgcagtgtggcatgaatgagaaccgaacacaaacatttgcaaacgaatcttctcaggtatgctcatctcaagcctgataggcagtgtttaattcagactgccactcggggcttcctttggctcttcgttgatgagggtgatgtctcgttgcatctgtcatacattttcgtgatattcccacatgtatgtagacaagatactgacttcaaattaaacctcattgatgatactctggatattttgtcatacgttgtaaaaaacatgcagatcctcccaaaagggttaaggcgggagatccaccactacacattgcccgttctcttctcttcttccttcccaactccaatggcactcacttcatacgtctgcttcaattgcaggcattcatatggattgaaagcatcgctgcgtaatttttcctccgcccgacgcaatcgagacatcttgcgacccgggacagctccgaagccgacgccggacgtcaaacacatccgccaaaatgccgacctctacgcacagaactgcgtagatcgcaactatgcaggtcacgccgggtatccgtcgaagattgagcaattatcggaggaggctaaacagcttgattacgacctgaagacccctcgatcccgtatcaagcaactagaaaagaccatcgccaagctacacattgcgactcggcaagaaacagatgggaaacccaatgagaagggcctgagtccaagcgaggagctggctgcactcaagtcagaagctcagcgcctaaaagacgattcgcagtccatgaccgaacgcaaaacaacctgcaccgaagagatcaaccgactagccctctccctcccaaacctctcctccccattcacacccatcggacacgacccaactctcgtacaatacatcaactttaacccggaagagccccccgcctggaccagcctatcccaaaccgagctccaagcccggtcgcacgtcacaatcggcacagagctcaacctcctcgacttcgccagctcagccacaacaacagggtggggctggtacttcctgataaacgaaggcgcaatgctggaacaagcactcgtccagtacgccttgagcacagcccgacgccgaggctggaaaaccgtcgcaccgccctcgatcgtctactcctacatcgccgaagcatgcgggttccagccacgcgaccagcacaacgagcagcagatctggtccatcgaacagaacgaacgcgacagaaacaccaagccccaacgctcgctcaccggcacggccgagatccccctagctgccatgtacgccggccgcgacttcaacccctccgagctaccgatcagactcgtcggcgcgagccgctgctaccgcgcggaggcgggctcccggggtgtcgacacgaagggcctgtaccgcgtgcacgagttcaccaaggtcgagctgttcggctgggcggatagcgtggacggagccgtcccgagctcggagggtatgttcaacgagctgctggatatgcagaaggagatcctgacggcgctgcatctgccctgtcgcgtgctggagatgccaactggggatttgggggccagcgcgacgcgcaagcaggatatcgaggcgctcttcccgtctcgtctgcgcgcggcgtcgggtggtactgctacaccagtggatcctaagattcatcatctggagtcggcttggggtgaggttacctctgcttctatttgcacggattaccagagtcgtcggttggcgactcgggtgcgtggcagtggcgctaaggagtcaaggttcccgcacaccgttaatgggactgctatggctgttccgcgtgtgttggctgcgatcttggagaatgggtgggatgctgagcggggtgttgttgttattcctgaggttctgcggccttggatggatgggatggagagtattggtcggagctaagctgaggaattgatctcgctctcgtagagacactgtatattatgtattttttatgaaaatggtggacatatatttatttcattccgctctctttaatataaggatacgtggttatcttcatggatcttgcattgtattaactgtgatcttttggtatatctaaaaacatagtagacacaaaaatgaggtcttcaaagacctccaacgcctgccttgttggggatagagcacaggattaataaaaacagaacagaccaaagcagggtagagcaactcatgacttcgtgaacacatatcagaaacaaggaaacaacataaatcaagtaaacatcacatcattgcgaaatcacagagacagggcacagagacaggggtacaatctggtctctttcgtcagacaataccagcagcctgagaagtcaaggtgcagataaaataaacaaaaagaaataaaacgccctcaaaaactccaagtagagcagaatatccaaagagatgataattagcgcaatttgtaaggcaaataaacagatcccaagaagttgccaggctcatttccatggtagatctatatcttcgacacgggtgcatgtcagatacggcaatcctgtcggagtattctcacgaggaccagcggtgccagtggttggttgatctgggcttttcagctccaattcgagaaaatttcgcatcagcggcttgacgatatcgcgtgccagccgtttcatctcgtccatcttgcgctcgaagcgcttgagagtctcgcgcgtgtaaagcgagccagaggatgatgtaggatggagcttgagaaagcgctttagctcttcatggggcaggtatgcctgcgtggaagaggagccgatcaatctatagatgcgcgcggacgggtctggggaggttgttggtcgagacgggcttgtcgggtgtgacgctgatgcggtaggttgaacgggaccatcgcttgggcccgtgtttttaaggatgggagctggcggtggcgtagtgctttctatcagccattggcggaataaacacacggcgagccagtccaggtatgcgtttgagggaccgacacgttcaccacgcgaggtggttagggataggcgtaggagcttggattcaacgcgagctttaagctcgtcgagatcttctactttgtcttcgatcaggtctaggagtgagtctggtagaggcgcgtaggagccgtttcgcaaactcggtagggcagcgggccactggccgacaacgtggatcaaggcttcggaaaaaatcacccggctgcgggcgagatatcccagcttcaggtagctgggtggatatttggcgatctgtttgaacagacgagatccaaaaccgagtaagtggtggtccacgcgggaccctgtcaccggaagcgcgtcatacatatccgccaatgcaaggagggatttgcactccgtatatgccgaggcgatattgacactgttgataatgggcgggtgattgtagaatattcgtagtaaattgtcatagtcacgtattaagggatcgaccgcaacggcgtgctctccattctgcggcaggtgcgctaccgactgcatccctgccaggttcgccatggatcgaaagaagcctgcctgggcgtttgacggcttggtcatagttgggggaaatgcagtttggtcgccactgaacatggggtcataggttggttgctgtttcagcacgcggcattagcattgttcgcagatgggagtatgcgacgcgccggcgcaaggtgtaccttttggacaaggattgcctcttcatcctctgcgcgattctcccagtcaagttcataccgccagcgtctctttcctcctggtcgcgtcgagagtccaccgttatcagatggtgccagtgttgacccgttcgagaaatcatcatcctcactcagtcgcgacagcgtcccctccggcttggatggacacagagccatttgccgcgaccagttttcattagtgctcgcctcgaagaaacccgaacattgtgataatattaatttgtggaggagatagcgcctttcctgcgatccggcgcggatcacgacctcggtgtcacctgtgtacgtgaagatggggaaatcgttcgaggatggatgcgaggagctgccatggtgcgagcgaccggaacggtgtcgtctgtttgagggacgcgatattagggaagccgtactttgggcggttgtgcgatcaacgatctgtgcttgggacaccatttctggggatttgttgacatatgcgaaccgggggtgctcaacacctatcagcataagagagcgtcatccgaggccgaggatgaaaattggagactgtcgattattgtataacagggaataaataaagagagaagaataaaggaaagagatagttagaggtagaggttaaggaagagaacggagtagttccaaaggctttccccgccgccaaaagaagtaaaaagagtatagaaggactaacaaagtcatacactgttatttaaggagtgagatagataaaatagatcctgcaaaggtccccgtttctatcacaatccagttacaactaaataaacacgaaactaaaatattaatagcagatctatggatgtgcgctgccgcaagcagctgaattcgataggcagagggccaattaccaatgcgacaagttatagcagaagacgatgaaaacataaatagtttctcgttatagcttcatatttatgttactttgatatgaatactacatcagacatgctattataaaatactactacctactaagtaacatcggggcttttcatttcttctttgcctcctccactttctccccttttagcccgtctccagtctggcctttttttgcctctcttctctttcttttcgttcaaatcccctcagcttcttctccggccttcttcggtgcttttgagttgctttttggttcgaaaaatcaatcaggtggactcgggagtatacggtctgacaccctatacgaacgctacttttattgcgacgctctgttccacttcctcgacgcccaacccccgcgatcccctccaaaaatctggccctggacacgtcttctcgggacagcttctatagctgtcccgatctgtcatcactgcagataacgtcagtgtctgcagattttggcagcgacgtgagaaccgacccgtctccttcgcgctgtccttccttcgagtctgccccacacaagaaacgctccaaagccaaagcagtctcgaggacagcgcgcggtgtcatcggtaaagtccgggcattccagcgtatcgctgccgctaaaatggcgcatccgactattaagatcgacaccagcgtccaggcgaccaagcgcgggctacccgagaatgacgacgcgggcctcgatatactcggtgcgaatcaggacaaccccaagctggaagctggaaataccgaggatgttccaccgtttctatgtcaatctgtctcgggtgagtgaggggtgcatcaacgtctatcggagaatactgcacgtggaatgtgactgaccgcttccttatgcagagatccatgacaagtttgaagatctggaatggatacagacctcacgtttcaccgagggtacactgtccaatgatgtcttgcatccttgggctatagaggcagacccgaaggtgaaagagaggaaccggtatattaatgtccaggcctgggcaaattgtcggatccatctgcgggtggccgagggcgagtgtgattttatcaacgcgtctccgatcatcctggaagacacggtgacacgagaaagaaggaaatacatagcgacccaggtaggttgcgtgtttgtcgtaaatattttatggttcacttaccattaatcagggccccaaacttggacatctcgcggccttctggcacatggtcttccatgaaagccaggatgtcggcgttattgtgatgcttactcaaacttttgaggccggccgggaaaagtgcgctcaatacttcccattggatacggagcaggcttcgatggtactattggcggatgagtcggacgttctcttcgatgagagtgagcagacagaacccggtatcttgggtaaggttaccttgttagaatcaaccttcgacgctaaatcacgatctgaaatccgtaaactcgaattggccatcggttcggagtcaaagattgtctggcatttccttttcgctggctgggccgattactccaaacccgaaggcagtgatcgccaagcccttcttaacttgatcaagttgtcagcctcaaaatcgggcccggataacccgcgaatcgtgcattgcagcgcaggagttggtcggactggaacttttatcgcgcttgaccatttgctgtgcgagttagaggcagggcatctgttggatatggaacatccagatgccgaccctgttttcgacactgtcgatcagatgcggcagcagcggatgatgatggtctacaacgagatgcagatgcagtttatctacgaagtcctccgagaacaaacagatcggaagctgggcaagattacagactggaacacagaatcacccgacggcagcgaagaacggtctgcgaaaatggccaagctcaatgaccagacagattacctgccaacctccaagccggagttggaagctgtccatactcatacgccgaccagaagtcggtccgccacaccggagctttctgatcccgataattaatgacgcccgctcaatctccaccgttcttcctaactgtgagcatggactatggacgagaggtttatgtttatgttgcattcattcatggcatccggtgtttacttggttctgaattatgccttgttccaaaccccctgctatgtattttttttctttttgttgaaatacccccgttttgttactttgatcattatcttggatgtagttatactgcttattgagtagcactgtcagtctcgccctagggtcactgtatattagccaattggtgaaagtgtatgctttgccgactgctctgagacattctactttcgccgagtaaacatttccatcataggtttttcgggatcagattcgttattggcattgttaaggctatgtagcacctcgcacgaattcctagtaaatccacaactatacaatcctttggaaataattagaaattctttgcacccttcgcatatcaccgaccatgtgcttgcccatagaagatcatccatcccatcacggcataatataacaataaatagaacaataaaacaaaatcgcagcactgctgagcacaaatatcgagattggtatcataccgacgtgagaagaagacatgaaatccatcatcataagaacagggagtatagcgaaacaagatcagaatacagcgcatatatactcctttccgaagcacaaagtacacgcctcgctccggtagaagtatcttcaatcaatgcgttttgccgcagcagggattgcgaccgactgaccaccgacagagccagcctcatgataactgggaggagcagccactcgctcggaacccggcgcttcttccgtatcccaattctcaactgcattctcgtcccaattatcgacttcctgctcaaggctcataacaccggattcctgtgggcccatcacttctgagtcgcgacgggggtccccggagacgccaccgagctcgacgtcctcggtgccctcctcggtgagcccataccggctttgtcggcggcgttccatcatgcgccggtggtaccaattgcaaattccgatggcgccgacactaccgacaacattggcgacaatatcgaatatatcaaagtctcgaccatttggaaggaaaccctgcacaacttcagagccaacacccagccctaatgtgcagaccacgagggtcacgtgtagcgtgcgccgacgggtagtgtccaggacccagtaaaacgttacggaaagtaggaaaaaggtgacaaggtggaggaacttgtcattgggttgaagctttgttggtatcgtcgaagatgtgctgtgtggaagaagaccgatgtagccggctaagaaaagcaggaagatgaaggcacctgaagcggttagttaggtgatcgccggaaccagaatggtaagtcagtaaagcttacctgcgaaagggtatcgaatgcgcatggtggtcgagtaataagtaagtgacggagaagtgagaagcagatttggctgggtctctttttctggtgaaggtgattgtccagtcttagttgagaaagccgtcaaatgtggaggagtttggccgcagctgatgccttgtgcgtcatatgcggagcactggggacgttcaacaacaaagcagaggcgaaagcttatacagaaacacagaatccacggtaaactcaacacaagaccaatgaggaatgatagattgaaacagctcaagatgtgaacaatagcgattgatcgcgagtcggaatagtaacaatgagacaagatctgccggttgactccgccttcatgtcctgtacttcatccccgtccagagaaacttccctatgaagctcccccggaccttgttcatcaaacctctccgccacgctatcattttttgccattttgacatcttgggtcgattgtaccggcggcgttttctatctctatgccttttgtcccttctccgacccctgtgtcgcgtccgatcggcccgtaatcctaatcgcggagaatcgagtctcgcccgccccagaaacggggttttggagcgagcatgtcgctcggccacaacgcctggcctccgggcaacattcggcccccagatgatctccaggagtctccccgcccagtcaatggcttggtaaagactttatctggctcccggacaccccaaatacgcggctctgttggcgccgaagcgccgaaccccagttcgatatccgaagccgatatcgcgcccgaggaggatccgcgcattgctcaattccgagaattgtatcgccgcagtgaggcgaaaataaatgcgctgttttctggacgatattcgggcgataaccctgcggctggggaagctactgagtcgtccgaagcccaacccgaacgcgtcgataatgcgcctcccccttccaccgccccacggaagtctgcccgaaaactcgacgacgatgattacgatgactatgacgatgatgatgacgaagatgaggaaatggacaatgctgttgaatcacctctggaaaccaagtccgccgctgcatctcaggagcctagtggtgccgcgccattagcacgtcgtcccagtacctcgatatccgccattgcggatgggcttaaagaacccaagaaagagacaatggaggatctccggaaacaactcgaggaagacaaaaaagcaacggaggaggctgccagaaggagtttccacactctattctacacccttgagaatgatagggatgccatgcttgatcaacaacgattggaagagtcagaaagacaagtcgaggcagagatatccggccaggctaacatgggtgccaacaatgtctcgggggcttccaatggctacagttccttgagtaacaccaacctcggcgcttccagtttgactctgaagaaccttatcgcacgaattgacaagaagcgagaccgggtgcaggcatccgatgctgagttgcggagcttgctgagtgaagttcgcaagaatcgcagcaaatgggcaaacgaagacaaggtcggccaggaagagctctatgaagctgcggaaaaggttcttagtgagctcaaagctatgacagaacattcaactgcttttttgactcgtgttaacaaacgcgatgcgccggactatcatacgagtaagcggccctttcaccgcaatgatttatttcatctactaactttttactagtcatcaagcacccgatggatcttggatcaatgaccaaaaagctgaaaggcttgcagtataggtccaaacaagacttcgctgatgacctcaccctcatttgggcgaattgcctgaaatacaacaccaacaccgaacatcctctacggaagcacgccctttacatgcggaaggagaccgagaagcttgtccctctcattccagatattgtcatccgagatcgtgccgaagttgaggccgaagaacgtcgactccagctggccgacaacgacggcgctgaggagagtgacgatgaacccatcatgtcttcgcgaggtagaaaggcacccggcaagaagtcttccaagaaaggaacagccccttctcgtaatactcccagtccttccagggctccaagcactcagccaactgcgccagctcgcgcagattcggacgctaccggtgaagctagtcaaaatggatttttcacaccacctcctgcatctaacacttcgtctgaccccgctggtctaggggcgatagctacaacgagccaggatgattcgatggacatcgacggtccaagtatgtcgacaactgcgctcagtgccatgtcagtttccggtggcgttgaaccggaagaccccgagtacaaagtgtggaagcaagtcaccaagagagacagagcgcgcgttgcggcggaacgacatcgtctcctccggggggacaagcttaactccgaagaacccgctttactcagaagtaaagctggcatgcgccggtggcttcgacatcagaaacaagctactatcgaaacagacaagtctcgcgatggggattctcaagccatggaactcgaggccgcaggcgagagcctcgcagaaggtattgaggtggaagaggatcagatgctgccttattattatgatgtcatgtctggtgttcctgatcttcctgaccggctactctggaaggaggacgcgcaaggcaatgttgttgatgcctctgaagagttccttcggatgcttccaacaggtcaattcatccaacccgatagcaagttgacccgcaagatgaactcgaatatgcggcagatgcaagaaactcgcaagatctgctcgaagattggcatcgtcaagcagatgcagcttcaatctcaggtaagcgagccccatactctactatgaccccagctctctgctaacttcttttctagatgtaccaaaatcaattccaaaaatatcagcctgagccatttctcgagcaagatatcgaaccacatgtcatgaatgacaacggccctgtcattgccccctgggtctgtagggcagcattgcagcgctcggtcgctaaagttttctatcacactggctttgaggaataccagccatctgctcttgaggcggttaccgatattgccgctgactttttccataagctggggtccaccttcaagtcttatatggaaacaccaaaggttcctaccaccgagtcacatgaagctacgccttcagccgctgaatggaaacctgcttacactcgttccgaaattgttctgcacaccttgtctaccgtggggattcatatagatgaactagagtcatatatcaaggacgatgtagatcgtctaggaagcaagctcgccactgctcatgatcgactcaggtcactcctgacagaactccttcgacccgctcttgagggcggcgaagatggctcaaacgcatttgccgatggcagtgaacagttcgtcggtggtgacttcgctgaagatattgatgaagatttcttcggtttcaaggaactgggcttggatcgggagtttggcctctccactcttagtgtacccttgcatttgcttcaaacccggatgttcaatgcggccaatccgcaaaacacgagtgtttcaccgaccgttactcttttcgctcctccacccccatatggacgcatctcaacagacaacttttctcaccaaattggactcctgcatgagttcttcaagggcaagcttgacgcaaacggtgatgaacctcttgtggaggacctagagctcccccccaagcagcgacccatggggatcaaaccccgtctcccagcctctggcaaaatccccatgtctagtcacctgggccttacatccagtccgcataaacgagccgctcaagcgatggcatccaaatctggcggcgcagagccaagtaagaagaaggccaagaagaacattggggtggccatcgaaatgcccaacttccaacccgatggtgaaggcgaccaagctactggtgacccggccacaaattccaatatgaagaccgaagaaaccggtctcgttgatggcactggcgaatccatgaccaacggagcgtgatgtataacttccgaggtcaggtaggtctatggttgactacgaaaatggccatatcctttccttcacttcctttccttctcttgagtcgcatgctttactttcgcatacctacctgcatttttattctgatcttcaatatctgcgacccatgtctcacgacacggctagacagggttgtgtgtccccttgccacgatacaattgacgaacagggagcgcgcagtaatatgagccagtattcattatttgaccattgcaggattgtatctttggatcctcaaactttcagcgacacataatccagcccttgtattctaccagtttttcttggttttcctttcccttctctatccttggctgaacggcagagtggacaattcccctttcagtctttgtatcataacatcccttgatgggatttcatttatagacggaatgtctattcagattcattcaatttagacctgttctcctatgacttaaatcttgtaggtgccagctcaagcaaagatcaatgggtagctcgacctgtcaatcatagatgtgacaagaagtgaggacaggagctgttccaagatgatgactccaccgaagctttatggaatgaatattttagacttgttagagatgtccaagaaaggaaagaaagcaagtcaatccaccaagttctattccacaatggaagactactttttctgtatcagaggttactatccaacctctaactacttgaagtgtgttaaataatggcataggagaatgaagtattttgggcaaaggggtttttttttgtattttctgggttaacaacatgataaagtaaagaaatatgaaagtatttcgtcatgaactggagatcaacctcggtatacaatcggccaagttgtttcggaaaacaaccgcccattaaaaccaggtccagatcatgcagtgtacatagacgataaaatagaaaacgaaagtccaccaagataaaagagaaaaaggaaatggaaaacgtaggcccattcggaaatgcatcgaagagcgacatcacagaagcaatgccgacgatattccgttcgagcaataacgtaagaaaaagaagagtaataggaaatcagttcgcagatagagaaagccgagtcatgagatgcctcgggagggatggcggacaagagtgaatctcgttcccaaccatagaaatgtggcaagttgaattagatgtaccacatacccagggccagcctgtttaaggtgccttcaatgggaagcaatctcttggctcggggttccttgggcttcgggtttgtcattttcacctccgggccactctgggggccagaggtaataggaacatcctcgtggtggcgagcacgaaccgaaatcaagtgggcatagtagattgctgggtgtacagacacagaggttgtcgagcggatgtactggtagcaatggtcattgatcataccctcaaggtcattgggcttgagacccatctcatccaacaggacatggtaatggactgggcggggagttccttgcagagcaatgtgtgtgtagagcaggaagtcccagtcatgtgggctagtaacatcccgatcaataagagtgcccggcaaaggagctccgtgggagtctgcggctgcgcgattcttggggtcagggaacgctcgaagatggtggcgcttgttggcaaccacaacacacatcttgcctgcccagactggctgaccacatgcatgtgcaattgcaaagcggattgcagggacctcctctgaaagaattctccggtattcggacgcagaaacaccgtcacggaaatagtagacatactcaggagccttgccgcccccaacagtcgctttccactcagcaaccatggggtgcaggatgtactcgatcactttatcccggataacctcaactcgatctccattagtctcgcatccacccatgtagcgagttgcagtggagtttgccgaaaccgacatggctgccaacgacggggtccacacacccatcattggatgagtgacgtctgcaccaatgatcatggagcctgggcgtagaccttgactctttgacttggggacagcccgagcagtgactccaccaagctttgcattcaccttcatgagaacatttgcgtggtattgaggtctattgctgatgcagtgtgcagattggagcacttgagagggggtgccgtaccggcagtcggaagacttcttgagacgaagatagacccaggagtccttgtcgggaacgatgaagaccatgagctgtggctcactcttgttctgcgctgcgatcgcatcgtacagctttttgacactcatgccaacgtcttcgctcaatcctttgacaaccggtcggccagtcacatcaccacccatgctcttgtacatcttgacaaactggtcgacccagttgagggtttggtcatggctgattgactttcgatgtccggaaaagaagccaacaccccaagcctggagggccttttcattgggtttgtaaaacttcttaccgcggagatcccaacttcccgcatgctgcgggttgtgcttgcggttgcccccgaactgaatctcaggactcggaagcaggcgagcctttgttttgatcatgtggtcactgatcttcataccgtaaagcttcaggatcgggtcctccttgtgctggagaagttccttggactggcgagcattggccaaacgcttcggaggcctggttgcacaccattggatcatctgcgccgcctgcatatcggtaagtttgtagcggtatctctgaaggcctttgatgactaggaattcggctgggtaatgaacgtcttccttcaccatctcgaccaagagcatattgggatattcgaggcggatgttgtaccgtttcatgaagtaatcttgaagatgcatccgagtagacgtcccagtagccttgtcgtgatagctaatgtaaaactcattgggctttgcgtgaatcaggcccttgacaatgaagcttttcatcttgaaaggacaaccctcgtagttgggtgccactcgaagaccttgaattctcttgttcacctgtgcgaagtacctcgattccttcgtaccgccaaattcgtcgcgggttgactgtaggttcctgaccagggtcgacttatcgttccacccgttcacattcatcatgtaccccataagactaatacgagaaaagaagacgcaatgagcgacatcaacattgaggatcagaccttgctataagtaaatgtcagtataccaatcttgggttcgaatcaatggattgagccttactggagttggcttaattgcctggtagattcctcggtaaacggaagcacccatgttggcgagcggctggtaaaactcctgcttcagctcctcgtcgtctccaagcttgtcgaagaagaaggcccgcttgattgcggcgaactgtttggtgggccattcacggagcaaatgatcaaggaagcctatcattatcagcctgatgaatcataaacagaggaagatgcggaataagggagcacttactcagagattcaatcacgagttgatccagatcatggcgattctgcaaccaggagttgatcactgacagattgatcttcctcttttgcatgacggacattctgaaagtaggactcgtcttgtactgattcttagtaagagtcttgacatcccgggtaaattcactcctgaagtcaataatctcattccagtcatcgaagttgcgtagcgacctgcaacacaggttagaaaatatataacagcaattcgatacattgcacttaccagcagattcttccaccatcccagataccatcagggatgtgtgcctttcgagtctcactgttccagcactttctcaggatccgtctgtcggtctcgttctggtctccgtggagaacattgatctaaaaattgatgagcgaagaatggcattagatggagggggaaaaacactcacctcgtactggtagacggccttgtccgggaaagaagtgatcgggtacgcgttcatcataacctcaatctctttgccggaagtgttgtaaccaatccgacgctggatttgagtctcctccggtgcagactagacaaaaaggttagtaaaatccatcaaccacagagctattgggaatgacttacagaagcaggcatgattttgaatcgatgccaaggaatgtcaatgttcttgcagccatcccatacaaccgtcatgtaatcttcatggtgctcaaccttctcaaggtccagtctgtgttgttcaaaaacagccactttcacgccttctcttgcaaggcggacgtagtttgccctttcttccgcggtccagttttccggaaattctggaggggtctggactcgacggatgggagagtcactgctactagaaccagtgctcttgggccgtttgtactcgcccgcatcagggtcatagttggttcgacgcatccaagcagtactttcttcttctttcttgcgccgtgcgtcatcttccaatttggccttgtggtcacgcagctcttggatctggcgcggatccagaggctttgccgcaggggtagaaaggcgcagaggaagacccctagtttgacgggaggatgaagaggagggaggaggctttgaagacgtattcatagcagcagtaggaggagggcggtgcccggaaagagacctctcctcctctttgccctctttcgagggtggcttcatggcctttttcggagccatgatggacgttgctcctattaatcgacctttgttagtcgctgttctagttcacgtctgaaattgcctgcaatggatcatagatgtaaagcgaccaagtaagatggatagatcaaagtgaggtggtactgctcagcgatatcaagtgaagtagaaaccagtcgctttcattgcacttggatacagtgtaggagaggccagagtgtaaaaaggatgatcacttacaaagtcaaggattgcagtgagccaaggatgatgattggaaaagagggaaaagagaatatggaggggagcaagaagaagagaaattgaaatggaggattcgtgggatcactgggagagaactgcgttcaacgttaacaggggctcacaggaagagaaatgcgttaatacgtttaacgttaaagtggcaaatgtaccttggaagtatgcagatgatggcaggaatccaagctactaaagacgaagtaaagaagagtgatggagaaggaagaagaagaaagaaagtagaaatcggcgaaggggtggttttatagaaaggttagggcaagcataaagagcagatgtattccctttaaggtatgaattgatattgtatagcggttgcctttttgaccggaaattatatgtataacctgttcaatggtaggagcaagccatagagatgcctaatatagtataatatcattcgcaatcacaaatgcagtcaaagtccgcgctacgtgacgatcaggtaattgtttatactagtgtttgcctaacaaaataagatattcaagactcagatatctcgcacttctagttaaaaacagaactgcggtcaaagtccgtgctaaatgataatatggtacttgcttatactaaggtttgcctaacaagatgaggtatctagtgcttagatatctcgcacttctagttagagatagaactatagttgaagtccgccatataaccataaggtacttaattatgctagggtttgcttaaaaaagtcatgtacctagtactcagatatctcgcacttttattcagaaataaaggatacagccacccatagatcagaccctcctgtctgaatctttagtaccgccttcctaattagttgcgaccaagactggtttacatagtaaaatgagatgcattttgatcagaaaaaaacgtatattctacctcacccctatgggatttaacccttgccgatgaagaagctgattataaagcaagatatgacaggatttaattaggggtttgcatacaaattttaggtatctgctgtcttgctcctatcaagaggagtttgatataaaagcggtgtaaaagttggaaggcggtataggccaagtattggtaggtgcctagcccaattaggaaggcgatacttgaatttcagacagtaggtcaatacccaaaagatatctcgttcttaaaagttgaaaagggatatttcaatcagaaagaaagaataaagaaagaattacaactgttgtcaaagcccgcgctacgtaacgataaggtacttgtttgtactagggttggtctaccaatattaagtaccctagtatttcgatacctcgcacttctggctgatatgtcaaaaaagacatcacgcacttacagtcaaaagacatagaaattgatcaaaagaaaaaaccataaatgctgtcaaagcccgcgctacgtgacgataaggtacttgcttatactagggtttggcaagcaatatcaagtaccctaatacttagacgactcacatctttgattactatcccaaaaccgctattcaaggctcaagatcagaaaacttgccccatttccgccgcatccttaggctgcactggtctaatacaattattcgtcaataaatctcttcataactacatggtcgcaatacaaagggcattcaatctgaatttctttagaatatcacatagacgaagtatacgagttctccatggacctggcgactcatcataacatctcttccgatgctactaggattcatcacaatcatggccatggaggaaccataataaggctacaaggccacaaccgtccttgctagggctctaggcctactttaaggagatggtgcattctacctagacacaaggatacatacagttgtgggcgtggtagtctacatatcgcttgatagccggtctcttggtggcattcctttgctaggagccattcattctccgcatggtattggataaggcacacttccttgttctggctgtcggacaggtcgaacaggatctccccacagtcgacaaattgttccgagatagggctagacagctgacagctagtcagaatgcaaacggactgaaggtacaaccctccaatcgggtccctctagctgtcaacttctgtctagtagaagtgtatagtgtaaatttcttgaagtagcccacgctttattccgacttgatctctatatcactatatggtctatttgaacaacaaatgatcaggtaccttttgtatgtgtatcccatagaaaaggtacatgtgcattagactagtttttgcgttcgacccgtgaaacccaaaactccacttcggcgtttggaagcgttggaccgagaactccgtaccattgtcctgataaattggggattagtggcttttttgtacaggcaccaagcacttcaatgtgtagaagatatttacaatgttcgttattttatagcgacctgacatatccaagtgggtttctagatcttaagataagacaagaacagccgatatgcaatctttgtagaaacaccgaatacagcaaactgagtataacttacgatggtggagaatgcagtgacagctgaccaatggcacaatgaaaacttttctacacgcacaactgctctgtcgtaggcaaacacctccatcctttttatcctcaaaccccggtgataactgtagtacactatgccgccaaagaaagcagtagaagcgccgacgaacaatgtcgtcgccttcgggcgcgtcaagtccaacctcaagatgggctgtgtcggcctaccgaacgtgggcaagagttcgctgttcaacctcatgacggagcagaacgctgcggcagaaaattacccattctgcaccatcgagccaaatgaagcccgttgcatcgttcccgatccaagatatgtatgtttttgccttttctcgatttctgtgtgcgtttttccacgtgatggatcttacccttcccgggagaggctctttccatttttggtcacttcaagtacgatgaacccctggctaatggaagataggacttcttgtgcaagatctggaacccgcccagcaagtacccggcctatttgcaggttacggacattgcggggttgatcaagggagccagtgagggagccgggttgggaaatgcattcttgagtcatattcaggctgtggatggcatgtaccacattgtccggtgcgttcgtggcgggaacttgagaaatgaagcagctacttactattacacagcgcattcgataacgatgaggttcttcatgtggatgactctgttgatcctgtccgcgacttaggtaagcatttatccctgtccaggtgatgcaggagaaatagacgctgatggtgctgcgcacagatactattcagagcgagctgtgtaagaaggatttggatattctcgccaaagctaagattgccgaagaggcaattgtgcggaaggctggaggaaaattcaagatgctgccgctgttcgacgagaccactgctaaaatcaaggaggtaagtcacgatttctcttcgaagagatgtgtagtttgctaactccttgtagctcttggaacaggataagcctgttagagatggagagtggacgactccggaaatcgagttgatcaacgagaaggtttgtccaattctaatactcccgagatcagtgacaatgctgacaatatcaagttacgtcttatcactaccaagccggtaatctacctcatcaacctgacaatgaaggactacatccgccagaagtgcaagtacctgcccaagatcgcggagtgggtcaaggcccacggcggccaaggcagtgatatcatccccttctccgtcgagtttgaggagaagctgtggtccctaaaggatgacaagccagcgctagacgccttcatggccgatattaaggttcagagccgcttgggcaagatcactaccgagggtatgtccccagtatttgcctcacatattcaatactaacagtcatggcaggcttcactaagctcggactgcaatactactttaccgccggcgagaaagagatccgctgctggccgatcaagcagggaacactcgctccacaagcagctggtgttatccacggcgactttgagcgcggtttcatcaaggccgaagtcgtggcgtaccaagacttccatgacctctgcaacggcgagaagtcgatgggaccaatcaaggctgctggaaagtacagacaggagggcaagacttacgtcgtcaaagatggcgatattgtacatttccagttcaatgttgcaccgccgaagaagaagtagagactgttcggaaatgtcatttgcctattattatcgctggaaatatggtctttactgttcctattgagctgttttatcgggcaaggtcttgatcctactacttggctttaaattgcatttagatagataccatggattcgaaagttaaaatggcttcaattttccagcatgttagaccctataggattagcaagtacgccgaattcggctttattggagaaattatatattctgtatacggcggatctgtgaattactgtatgtggttagttttgcctcattggtgccgtcacgtaactgcaaatgttagtacccactgtacaaaacccaatgcgaagatccattagtctatattagggctagaaatggatcatcgagatccctgtatcagtatcaatacagtgacttactataattaaaatacgttgccctgtcttgtggctgaactggcgatatactgctcccggatacctacaaagaagcagagagccgaggattatgtcaaattcatggttatatggaagaccgatgtgtgggatgtctgcccagggactttctgttttccccaccatcacatcacctcactggatgcccgacatatcatcagccttcatcttctcacattctttctcccactccccatacgtccgaaacaagtactcctgcttgtccggatggttacggtagtatgtttcatgattgatctcacagacaccgtcctccttcccctcgtggtcgatgcagaaggcccgattacatagaagacatagctgggttgggaggttgtctttcaggtgtggttttctcaatcgcatcctgtcatggacgtggcaggatccagcactataggtttggttctgaggagtttgtcagcctactgaattaaaatagaggttggtgcgaggtggagaaacggaccattctgtaatgttcgatggaggttgtgttgataggttttaaaggcaggatctcgaaggagcgagcaatggaagatagaaataagggtctcaaattgggtactgttgcattgcatgacctcgtaataactagacgtgggctgcagatcttggcattgtactaattcctaaggaaatcattcttcctgatggaaagaaaatgtctcatttgttactgtcaggcggtttcctgaaacgaacgaagtgcgagaaagggttctagcatggctggagtaatgcctcgtggtccgcaacctgaaattaggcggtgctttgacgctgccaatcattcgtttatcggtacgagtctttaagggtaacagagaatacgttatttgtgatcgtaatcgcgaatggatccggggatatttgcaagggagtggattaggagtcgatatgatgctggatgaccaggaccaagaatttcccatccttgagctctaacaaaatccatcttgagttgaacgagaatagcaaccggatttcaatttgacagtgttatatactatagcattacgatagctttccaatgaagacatgttcattttatcgacacgacagccaagactaaaggcagtggcttaccaatgatactctatatcacgagacagcgaaggcccggtgatgggtgagggcgagattctatcaagcgtaggttaatatttgccatctcagagccgacggaggaggcaggtgtttcagtgcattgacgattgctgattttcaaagactcttctcttgatgaaatatcgctgcaattcaatagtacagaaaagctgcgtccatcgaaatggcttggggtgtcaagtccccagaaattttccataaatagcccgggtggtctagtggtatgattcgcgcttagggttcacccaaagcattaatgcgcgaggtccccggttcaatcccgggctcgggcccattcttttttttcctcttctttcttactagttcattgcaacttttgttattatcaccagcagtcttgaatagccaaccctagcaacaagacaaattatcatgccaattaccggggaagtgctcgaggccaccgttctcggtcacgcgatcaacaacgtgtccgaacagacaccacgcgcggttttcaaatccatctgcgcgaaaaaacgacgaagcccgcgtagaagccgagagtcgactggtggcgatagtctccgatactgaagagagccctggcaacaataagagaccggtaccacgctacgcgtcttgtgtcaattgtaagaaggaattcgatgtcacaactaatacggaggaaaactgtccaagtgcgactgcccagaatggagattgaatttccagtatgctcaaagaaattaggctggcactttgtgtattcggcttgttttcagctgcatatatcactccttttgtgttggatatcagacatgtatcattccactgaactgaacatgacttgctttgagacaaaagtctcatgatgaacagtttccaattgtaatgtctagtcaatgcaccttccttgcaagtgttcaatgtaaacaatgtaaacattacggattgggaaggtgccatgtgacattgacattgacattgacagggaaggagcgagggacctgtcgcacttgaggaaggcacgtgggttggggtataaaaggccccccccccccaactcttttctcttcttcttctcttcttcctctccccatctctttgaccaccatctctccgtagcctccacgagacagcgtcgacagagggtcccgtagcacctgctgcccaacctaccacagggacatcaacattaccatgttgtggaagtccatgtaggtcagcatcaaatatcaaactgggctttctcgtggatgttcctgaagttgtggctctcatggccacttgatgagtcccacggaatacatgaggggtggggacggcggtagccgaagactcgtaacttcatattgtgtggacattgcaccaacgacataggaaaaaccagacgatcttgtcatgtaccaactagaattagtggtcaatcttcagaaacctacttttgaagagtcctccccaacggccacccgtacagccgcagtgatgcatacgtcagtgtgactaccgcacgggttgctgcatacatataaacgatacctggaggactgccagctaattgctcctctccctcttttttcttactttccccagtcagcaattgcactctcttctctcagcctctcgatactgccccccccccttttcacacccaccatgtgcgacgaaatgtatactcgtcaatatcttgccaagatgatgggcaaagagatcactacacactgcccggactcttcgaatgaaaaataagctactctctatcccactcgcaaatggcttatcatggaaaagctaagtgagcaaccaaccccggttacccaagaggatttcgccattggtatgggcccggcatataccacaggaaaatatctttgtcggcttgccgagaatgaggatacgctcaccttgatgcgtatctacaaacagattcctctaattgacactgaacctgaagactcgacagttcggaaggaacaggcctgcgggccacgcaaacacgtcgagctgggtgccatgaagcgttttacagagaacggctgcactgctacccccagtcttcttgtgtaccaaatcggcaagcaggatgaagtggaccttgtctctggtgggtatatcacataccttgtatgggaaaaagtcccaggagatcctcttgatattgagcagttctggatgtatccgtacaaaaaacgacagaaaattcggaagagtttccagaaggcctatagatttgttatccgagcttgattatcatatacttatagctaactagaattcgcgaagctctaagcttcaagtacgagccaatcttccagaccccgacaaagatcatagtcgacgaatcagataatgtgtatgttctactccatcccttacaatcccaagctcatagcaggtagcaaaatctgcggtttcagccgggctttcccagtccccaatggatggagagacgaccagtacgtgatgttttccctggtcctggcctcccccgatgacgctgagtatcttcccgcctcggcggatgacctcaaatctgggccaaatggctggaagtggtgaggagcagccagacaagtgtccaggccaaatggacggaagggtcttgaaccaattctctagatagtcaaacagtctacaaattgagtgcatggtgcttgcttaatttattcgtgagattatctgcttattcgagtctgtacaaagcatggctgggtgggtccaaccagcaagcagaattggtggcccgtggccctatgtaaaaaaaagaaagagataaatgccaggtagatcaacgccggtggaagatgcaaaggggggctgggctctaaacaaccgcgtatgctccgaccatgtttccatgtttcatgaaatgacccccacgaaaaaaaaaagctgggccatcgagttctcaaagacaaatcgggatattttgcgcgccggggaaatgaaattgcaaaagcagagagcaaggggttttacactgcaagtggaacgatggtggtccccagagagaaacgagttatcacgggctcaacggtaaccacctggggatatatgagtgataatgtcattatgagagagacagataatagacttaccggagtagggattttggcctccaccgtgcgcagcttgcggtatctgtatttgtgaaatgtcggaaggaatatcaacgtggcgaagaaggtctatcattttctcgggagaaaggcgggtaatattgtatgttgccgcagaaggcaggatgcttaagagattcaccacttcacgaggaagaggagctggagacccttggggtctgtacgaggtgctctggccgttcaactgttgtactcgtttcggctggtcgaggcgccgagcttgcgcgctcttcattggtgactcagcgcgaacaaactttcgtggacgacctgagtcttcatcatattcatcagtaggatatggtctcttaggcgaattgagagaggtatccatgtatctggccatgggagaaccgtgatattccgcggagattcctgccatattggtcttttgccttgtctgggatggggacaaaatgagttgcaccgacgtagggtcaaagttggagttagagtagcgattggcgaattgttccaggacaggatcctccgggtatagttcgcgcatgcggttctccaagttgataacttgggtgaggtcaccgtagcgagattcatactcgtggaggaaggaaaagatgggcttagccttgtacacattctccgggttggatgtcaattttctgacggttgtttcgaacacggctctggcatcttttgcagtggttagtaggtcttctataaacacgggatgtcaacttactgatggtatcattaatgtcgagcagatgccttaagtattcgagcgcaaagtgctcatcctccgggaataattttgcacccctctcgaagatcttggtggctgcagggtctttgtagcaatggtactccatcagagcactcgcgatgtaaacatcgcttgtaatccgacctcgtttccgggcttcggcaaaaatttggcgagagccagccagttcccccggttttcccttaccttgaattcgacgcatcgaacgcatgagtgaaatccatgcaaaggagacagtcttggagataatgttgatctgaacggaatgggccttccggaccgcatcaatctgtgccgtcttggcggcttctctttctttagcttcaggatcatcatcatcctcattttgaggttggctttccacattttgtggagcaaaatatgcctcgatgcgtgcgacgtcctgggtttcctggttgcgagccttattgatcaactcgtaaagagcatcaagcaatttgtcgtacggttcccggaccttggcagcacgcttggcggaatcctgttccgaatccgaggtaacctccaatcgatccgcgcgtttgaatgtcagcaaacaactctctgggtttgcatcaatgccattcttcaagaactccgtgcctgcgtcctccatgtcgttcaagaagcagaactcagctgcatcaaaccacatctcgggcaagaaggccagtgccatgagtgcctgtttgtagaagtacactacgcgtgacttgtaagcagcagggtcttcttctttcagtaccagaggatcttctttttcccatgcgagccagcgcttccagatatctgcttgtgctgagaattcaacgtcgccttcagaccccggaaggggaggcagcggtggaagcgaagtgcgaatcaagtcacgagtgatgttttgcaattcggtgtatgagctacgcgcagtcatgtatgacggtgaatgttcttgaaggaatttgcgtccctgatagaaaaggtcaatataagccagttgaactcgagtactgtccagcttaccgtgagcttgtttagattcatctcgaattgatcatactccttccagagagtattgacagcttgggtcggcacgccaatggctcgttggtaggcctttcgcagtaggtccatcttttgttgatcctgccatccagatccaccaacgatgcctggcccagaacggatgaactcaatatagtctgcccatatgtttccggaatccttgtccatcccaacatattgaatggccatatcatatgccgatgaaatggtcttccttgcctcgccagaggcatctgttgtcaaaggattacgacgacgaatgtaatcaaggtagacagaccaaagctgaacgctgggggttgtcaggagcgttcggttaaagatctgctctaagcggaagaattcattgagctcagactccatgctggcataagccacccattggtcggcctgtgatgtatcccattagcaatcttgtatcttgccgagggtgaaaatgaaagaacaaagaaagggagcaaaggtaggcttaccgccatggggaacaacttcaagaaccgctcataggtgtcacgtgcgctgtctagtctgctgcggcttctgtgctcggcaattaactccaaccaagcagggatatcacctcggggatcctctcgaatccggtcttccagcatgccgacacgatcatgggccagacgaccctttgaggctggagagtcaggtacagaagtaggaacagtactgttctgcatggttgcggattgcaggtcttgcgcagcccagtgcgattggccaggaacagaagagggatcaatattatgaacaggatcaggagaataagaactattggcaacatctggtccactggcaggtgcctgctcagcatggtgtgatgatacatcaggggaagtgttttgcattgcatttcctgaactgggatcttcagacatggtcacaggcatagcattgacatcttcacccccaagtacagccggcggctcatactccgcgtcaccctcatcatcctcgtcatcatcaacctcaaatccgccaattattcgggtcttggactgtggctcagcagtagatgctggcacgggggtcgacgactcaacacgtgaggggttctgagaagggtcgggggagtcactagtctggccagcgtctgcgtctacttctgaggcgacatctgcgtctggggcgacggtcgggttgggaatgggatcttcgggctcatctgagggagccgcatcagtggggccggcaccaggctgcttggactcgggaagggagacggagtagtgatcccccaatgccagtgaggggtcgtagtcatctgattctgcgtctgagttatcaccttcctgctccttagtgggggattgggaatcgggattcaaggcttgagcctggaagaaggcagcttcagcttcatcgtccgccatgatgggatagatgattaatgcgataagagcgaggtcgaagcaaagtaagcaaccgcgaaagtcacggcgcaggccgaagcagggtttgcgcggtgtggtatcaggaggaattaaagtaaagaccaatgctccgaaggtcaagggttaaggtggatcacagccactgttgacgagataaccctcagccgcaatgtgaagcaaataatagccaagagtgagagggtgcaaagctgcgatgggctgtgatgcaagttgcccggggattgaaattagggtcacgtgcgggcggtgaggacaatgcgagggacgcgaaaggcgcgtcgatcgatgggctcctcgcattgagctagaggggttgagagcaaactgcattcttgtggacctgttgttttctcttattttctctatcttcttcttctttccacccccctgttcatacaatcttctactcttgcctctactctttaatcccacgtacatacactcatatcttatcacaatgtccgtcgtctcactccttggagtgaaaaacctcaacaacccggctcctttcaccgcctcgtaccaattcgaaattaccttcgagtgccttgagcagctccagaagggtgagcattggcttattctcccatctcctcagaccactcttctaacattctttcagatttggaatggaaactcacctacgtcggatccgccacttcgtacgtccaccctccctccctcctaccaatgccacaaagtctaactatcacagcgccgagtatgaccaagaactcgactccctcctcgttggacccatccctgtcggagtgaacaagttcatctttgaggccgatgcacctgatgtcaagcgcattcctacttccgagatgctcggagtcactgtcatcctgctcacctgcagctacgacggccgagagtttgtccgggttggctactatgtgaacaacgagtacgacagcgaggagctggcagctgagcctcctgcgaaacccgttattgagcgcattcgtcgcaatgtcctcgctgaaaagccccgtgtgacccgcttcgccattaaatggtgagaaccccttgttttgtttatttacatacctagtgcggcttttactaacatttttttttcttagggattccgatgactctgcccctgctgagtacccgcctgaccagcccgaggccgatggtctcgacgatgacagtggagcttacggtgccgaggagcgtgagctcgaggctgcgctcctcaaggagctcgaggactcaaacaagcccgccgaaggcgaagatcatgagatggaaggcgccgaggcccccgctggcaaagaggacgatgaagaagagatctccgatgccgagagtgaagatcttgaggcggagagtgacgacgatgaggatgagctcgatgaggaagagggtggtgatgctgatgaggatgtcgagatgggcgacgacgcagaacacaaggacgatgctgccaagccaactcaccagcctcagcccgagctcatggtacactagatcatggtgtgctaccggctcgcaggagtggtttctttgcttttaaactcttccttttttttgaatgttatttaacgacagccagaacgcaacgtttacgaccctcggactaattttccatgttattatcctgatttgcattggctatcggtctatgaaatagaattggtataatttaatcccactggcattcagtcagccgttcgtattcatttctctaaatatgccgtaataggcacactaccgggccatatttgtatcacataagaccgactcccagatgcctaactagctatattgtacggagtagtagagggtagattaatgtcaaaaagcgttatactcttgagtttgccacccgagacgaataaacacctacaattgtgagatcaaggtggatcagcttgaagcggggagtcaaaaagtggatgaatgagattgcaaagtgatctgtcaaataacataggcacgatgaccccgctagttaacatgacgccggaaaaaaaaagccaaagacgccgacaatggacagttaagccatttcaaaaacccggtactatttagtaagagatctcgcctaaaagccgaacttggaaccaattgctgttgtcaaagaacggtcagcgacagttatgcaagggggttaagcgtcaaaccctatacatgggtctgtggactttgaaggaagattgacttaccgcccaatatagccttcttcttttgtgactgtacgtatttgccaacatcgttaacaaagccgctgctgttttcctctagcctgtccatgctatctccgacaatcccgagacgctctgtgcgttcttggacttgacgtgacatgtaagaccagtagccttcctgtccctgtacaggtgccgttggaatccgtccttcttttagagctctccgacgttcttgttcttcgaatttcatttgttcgaccatctcctttgatggtggccggtctgggccgccaactaaatttcatattagattctatttagagcggcatgtgcgggagtgacgtacttaaaatgtccatatcagccggcgagatatattgtgtaccggagatccattgcacgttcgtgatggtaggacgcgggggaaccacagctgctgggttgtaaagcttgtcgtttgaaggatgtctgtatgagtagggttagcattagcactatgtctcggcagattaatgagggacacatacagtacgtttccgcctccccagacattgaacagtccaacttctgatgggccgacccatgtcatgacgtttccagtaggggtgatgcaagcttctgagagacgtcggatgtccgcaatatggccaatcttggtgcaaccaatatctcgaagagcggggatcgagaatgctcgcgcgttgccgtcaccaaagagaccaaccaagctgtagccccgtccttcagtcttgacaacagctgctgaatcgcaaagacagtcatcccatgccttgtgagcaccctttgatgttgggggcttgaagattcgacagccagaggcagtcaccgcaatgacaacaccattaattttcgcgccagttctcaagcctccaactgcacttggtgtggccaaagcagagccaccagaatcagcatcgatggggatgacactgattaccctgtcttcaacggccgatgatccagcaaaagcagcttcgtaggtgccattggacccagggaggatcttgaatgttgcgactttgcccttgttcgtgccgacaaagcagcatatgcttgagtagtctagcgcatagttagtacattgatctgattcgagcccgaatcatgcataactaccttcgccgtccaaagtcatcacaccaaattcaatcttagtgggccattcaggttggacttcgtccgaggcacggttcttgaggaacccgctccgcttctgtcccttgaggaggtctgacatatgtgcagtgtgtataatggcgggcccgcgtaggtcaataatcaccaaagtaccgcttttgtaaccgaccgctacaaatcccacctgcccatgcttcaacgccgtcactggaccttgttgcatatccaaaagagtcagaggtatcattcccgtcttgagcccaggatctgttcgcttagttatcgaggtcaactgccctggcggttgattgacaccgggggactcctcagtcccgtatgaggggttattgccccatcggaagacggcaagctctccggtcttgagtccaatagacatctcgcctgagccgctggcgagagacatttcaatcacttcgatattgttgactcggcctatggcacgggcaagatcaatttgaacgacgtcgctgttctcaatttcatcaccgtgcccacagtcccagacacggacggttccatctgcgtgtgcggtcgaaatgatattccggctctcaaatcgcttgaaagtgttctttgcttctacgccgcccatcacaaatctgggtccctgcatccggcgctctctcagaccaagccacaccgaccgatcaactggagtaagcacagctttgtttacaaagggatggacgaaggtgaggaacggatgaagcatgttagtgggagtaattgcgtgtccgctggggaaactcaaggaaataatttcacccgaggatagcatagcgataagtgcgattggatcatgggcgccattgaaatagggcgaggatcgggggatgaggcaaaagtcaacaaccttagctcccggtgggattgatagatttatttgtcgccgtggccgctcgaggtaagtagacagtatctgccaggaggacgtctgatagttgggggttgtccccatgtccaggaaaacgagtcccttgctctgatcacctactggtcgaccaccagccaccaaaagaccagtgtcttccgggttatctttggtgcaccaaatagcctttgtgatcggctccttgggtccagcaccctctccaggtgagcccggtctgccagcagcaccggggtggtcgacattgggtacctggacagtccgggcatgaagcctacggccatcctttgtatcccatagcactagacttgaatcatcatgaacggtcaaaatgaagatcccgttgggatgccagatcgcttttgtcaatttaggtctgcgcacgtcgtgggccggtagggagtctccacctggtgccccaggagggatttcgtagacaaagtacttttgagcaatattttgcttgaacgaaaatgtcactgctccctctggatatcccactaggatcttgccaatgtctcgcggggagaactccagagatacgacgggaaagaaccgcgcgcgagggtttctttccaaccacaagttcggaactttgaacggcgtcaaggactcccgatcgagatcgtacgcaataatctcacctatccacaagtcaatctccagtccttttcttcccctaggaatttacataccattctgcatgccgataaaggcataatccaagcacgggtccgttagcaaggcagttacctggcccggtggcgtataggaaaccaccatgcgtccagtcaccaaggagaatatgcagatttcgttcttggagtcgatgctgaccagtttgtcgccgcaaaactgaaggaaccgcgcggacgcttttcgcgggaactcaaagaccaccgaaacccggcgttgcccaaagacatagatctgcccgctaccgaactgggtatcaccggtaccgaccgcgatgagggattgtatgggatcgtatgcgatagtactaatctgcgaattcacaccgcatcgtgcgaactgagaacagcggtgtcagttggggaaaagagaatgctagggatgccaagaacttacatcgtccaggaggaacaagtccggggacaagccctcggacaggtccttctgtataccagcttgctttcctcgcaggaactgagccatctgcgataggggtatagcaagttatggaggagtagaagaggtcaagtgcggagaagaacaccattgacgccatgcaaaagctaaacaacggatctgccccgctccgccctatcgccctatcaattccgacttggcattcaaggcaacgtgattcttttcttggtcttcttgttctatatataggttgggatgaaggtcgtatgtattttatttcaattggaacccctggaaattcgtggataaaaacgctatataacaatgcaaaaagaacaaaactccaaatcacatgcatgtatagggccagccccgtcgctggaaggaacctcgctatgcaacagaaccagtataatcgagatcgttttaggtatcaccctggacatataaagcgccagacaaatcagtttgccccgttatgccagttcaagtctcgtcatttccgcaatcgtggttgtcaatcgtctccgcgcatcaaattcgctcgtctcatctcgggttcgatagtattgcacagtgatttgggacaccagccggtagcacgcatatctaggaaaagaaagagttagcagaattacactaaattgtaatggtattccaaacacatacaaagccagccggatgttttcctccattgtcctggacgccgccatccctgctccctcaaagaccgccggggatgcatccgcgaatacctctgccatcaaaacatcaccccacatggcactgctgaagtccacgataccagacagctgtccggactcttcgtctaccaaaacgtgggagggtcgaccaaagtccacgaccacaagacgtggcagcgatacatcttcaagagcaggcgctaaacgactcagctcctgccggatctccgagtaaggaaggtggatgaacatgtcctcggcgtcacggagaacaccttcaaccagggaacagaaggcctctcgccaggagggtcttccagcgccaaatgccacttgctgcaaagacccaaacccaggggctgcgtgttgaccgatggtactcaccaagaatcccaagtgccggtcgatatcatccagttgctgggaggtgagctcgccttccatctctgatagactcttccctttcatatattgccggaccaagtaggcagacccccagactcttctgtggggatcataatgatagagctgcggtatacaagggtttgcagactgccctagaagagaaaggaactgggcttcggtctcgaggaacgatcgctcacgccgaagcagagcggtccgtgatgatggggatccctttagcaacaaatgagccccatttgacagcatcagaagccgcaatgggtgcatgtgaccgaaaattggatgtgagtgctgcacacggactgtagaaggaaacagcagcgagaggacatcttctagtctattgtgttcgtctacctcggcggcatgagactgccaacgaaaggaatcgctatggccgtgtgttcccttgaatgatggcatcgcagaacatgtcttcaagtcaagttgcatcataacctgtttggtgggggatgttggcgaatagagaggatgctatataagccaggctatgccgacccatgaatcttggaaaagatattcgggggatgatgtacgaaagggctactcatagaccttgagagccaagaggtcagatatatgccgaggggatagtttgaactgaaaagcatcttcccagcagatgtggcgcaaattcgcttctgggatagagaattcgcgaaggaacccatagtacggagtactctatagtgatccttcgaatatcaatggagcacagcagaccgccatgattgtctacttcatacgtgacccgcaataggaacagtgacagcttattttcggcgacgtgcctcttctaggttcatccacgcgagatacgaaagagaagacatcgctatccgaggttggacatagattgcggagtcgaattcgaagaatctgtttcgctgagaaagcattcacaagcgagagtccaaagacctgttgtcacattggttcataattaataggaaatatgggacaagtaaattaagtgaagccgtctcgcctaacgatcccgctctaagaaaggtgatcatccgagcactttaccccttgaccaatcacaacggttccttgccgaaatcttccagtggagttcagaaattatagaacttttcaagggttctaattgttctagttgttcttctcggttactttccgaactgatttcgcttactattcgaaactagtctatttccgttttagccatcgcttctaatggctggaaccgtctgaaacactcgatgcaagccaccggaggttttactctaaaatgaaatgacttgcatctcaaacagtttttggagtcatgatggacacttggatccgcatacatatagcttctgtcttctgtttcattcttttcgacccttttttggactatggggcttgtcggtacccgtcacgacttatcaccgtatgaattcagtcgctagtgttgagccctctggtatagtatcttagctacaggaagtgtgatactactagttgcaaagatcggggttcaacgtcaagtatgtttagtgtacttttagtgtcgatggtcaaatacatatccgcctcttgtttggccgaggctaaatatatcattctaacgaggctaaaaatataacagaagggttttctctagctttcttggctgtttcatctgtcagctataattcaagagcctctatcatggtactcaattcctccaacgtcgactactcgatactggacgcatgcaaacctcgtcaatagtgtatattatttatgcggagatttgcataaatcatgcaccggaaacaaaccccaatatggaaggtgtctatggtttctgtttcaaattcactcgtcttgctacacacgaagtcgcccgaaaagattccgagttactgttcgacgtcacctgcctatgaaggtatatagatgagtcggtttacttcaaaggactagttatgaatgtatgagaacagcggtggagatgatataagtgtagcatcggtggtagtagttattattgaactacctaccgcggtaagtaatgtgtcattgatgctaagccttagactcagtggccggctctgcttttggtgaaggatcgtagatttcggccaagttgaaccgctttagcttatcataatcacctggcactacactcattccaatcacattctgcgacaagtcagttgaagatttagtagagggttcgttttgtagcactcacttgggcaacatcaacgaggatcattagatcataattcttcagattcaccggatgctcaggcccgacagcatcggcaacagtcttgataataacgtctcgattgagcttcgagttgccccgcacagtaggccgaatggcatactaaataggtgacagatcagcaatgctcaaagtacatttcccctcacagcaagatcatttcctagattagtagaatctccgactgcgaggtagggatgccttcaactcaccgtctttggtggcccacccgaatggaaatgaggcttgagaatctctttcgaaaaagccgccaagtccacactcagggtcttccggattgatgtgactggatgcatgcgcttgatccatcggcttttcttagtctccggatgggcatgtgcttcgctacacagacggtgcacaagctgtaccgggtctattgagggatccagacgcatgaatgtaactgacagggattagcacctatgaacgttccgagggccgagcgcataaacgaaatggcgtttctcggacgatcgcagacttaccacacggcatgtccatctgcacgggctggaattgacgagtattgtttttgctgggctgtaggccctccagttcccttcggatctgggcctcgatatcttcatcatccgtatcgtgatcctcttccttttgattttcagtgccctcgatggcctaggcgaagagttagcgaaaaatagaagaatgatcccaagcggaaaaaaaaaaaaaaaagatctcacctgagtaaaaatatctactgcctcagacaggcattttccctctctgcccatatcgcatgtcacaaagacacctacatcgccagattcaatcgcgacgcgactggcctgtttcccatattttccaccaccctaatcccattagtcagtgctccatcacaagatttgttcgaaaccaacctttctcttctttgaagagtgacttgatctatcaggcatagctcttttccccatttagcaatctaagctttgatatgccaggatgttggaatgtggcccaggtggggggtcggagtttgtgtgatcggccgagagctgcgttcggtttagccccgagatcgacctttttcatgatatgcttattcctccgtacatcggatttgcgacctgtgtacactattctatggcatgattatgtaggtctagatacataataaaggcttatttgttctgctacgtggcctagcctacaaattgactctaaaaataacacaatgtctatcaaagtacgaaatgatggcatgacatcaagaccatgacgtagtccatgtggtctcacctttctcacaaaagttcccctccccctctatcccacctcacctgttcctacttctctttccattctaccatatccctccaatcatatcaatcatcatggtgtctaccgatattgctaccagggaactaaataatcccgtggatgttgccgaatacttattccgacgtcttcacgaggtcggaatccgctcattgcatggtctacccggtgattacaatcttgtagcattggattacctgcctaagtgtggtctcaattgggttggaaactgtaacgagcttaatgccggtaagacagacttgacgacgaatgaacaatccccatctaacatcacctcctcttaggttatgccgccgatggttatgctcgtgttaatggcatcagtgctattgtcaccacattcggtgttggagagctgtccgccctcaatgccatcgcaggagcctactccgaattcgtcccagtcatccatatcgttggtcagcccaccactcagtctcaaagggacggaatgttgttgcaccacactcttggaaacggtgacttcaatgtatttaccaagatgagcgagggaatctcgtgctacgtcgcacgcctgaatgaacccaaggacgcagccactctgatcgacagtgctattcgtgaatgctggatccgcagccgtcccgtgtacatcactctgccaactgatatggttgctgctaaggtcgatggcgaccgcctcaagacgccgattgatctttcattgcccacgaatgacccggagaaggaggattacgtggtcgatgttgtcctgaagtatctcgaggccgcaaagaaccctgtcattttggttgacgcctgtgccattcgtcaccgcgcactagatgaagtgcacgatttggtggagaagtctggattgccaacctttgtgactccgatgggcaagggagctgtgaacgagacccacaagaacttcggtggtgtttatgctggcaatgggtctaacgctggagtcagcgaggccgttgaatcctccgatctcattctgagcattggaggaatcaagtccgatttcaacaccaccggtttcacttaccgtgttggacagctaaacagcattgacttccatagtacctttgtgagagtgcggtactcggagtatcctaatatcaacatgaaaggtgtcttgaggaaggtcgttgagcggatgagtactctcacccatgctcctattcccccggcttcgaaccgactacccgaaagcgagaaaaactctaccgatcaaaccatcacccacaagtggctctggcccatcgtcggacagtggctcagggaaaatgacatcatccttacggagactggcactgccaacttcggtatttgggacacccgcttccccgcgaatgtgactgccatcagccaagttctctggggcagcattggctatgccatgggagcttgtcaaggcgctgccctcgctgctaaggagttgggagatcgtcgaaccattctcttcattggcgacggaagtatccaactgactgtacaggaactaagcaccatcctgaagaagaagttgaaccctattgtgtaagcattcccagcagcccggaatgcccatatcatatactaaccatctccagtttcgttatctgcaacgacggctacactattgagcgatacatccatggatgggacgcaggttacaacgacatccagccatgggactttgccaacattcccaaggtcttcggaggagacaaggacaactacgcaggctatcgtatcaagacccgtgacgaactcaacgagctgttcaccaaggaggaattcaacgtttccgacaagcttcgagtgagttatcaatacaaagaagtcccaaactgtttgctaacacggtatatagctggtcgagctgtacatgcctcgtgatgatgcccctgcggccttgaaattgaccgccgaggctgctgcgcagcgcaacaaataagcggttcgaatcacgagaaagtattatgactcttgtcgtaacgttacgatgcatatgaaaagcaacatgatagcaatacctgaactctgaattgtttaggcctcggtgctttctttccattctcacggctttcaaagggggtggccgcatagcggcgggatttaataacggtcgttgagtatgtagcatgcacatcttcgctcttcactcatgaaatacaatgaaatcttcatatcttaagttagaagtctaccattatcaaaatctgggtagatatatcaagacatgatactaagtagatgagaaaatgcaagcaacgccgacccagcgtccgaggctagtacgaggctagtacgaggctagcgtcgctacaatgtcaaaataagcatctcgcgttcaaagttaaagttaccaagccaaatgctttgaagttttctctggcagattctgctcaatttaaaccaatgtcaacctataattcatttctaaagctgcatacactcctgcttatgggaggtaggaggtggcatctttcttttaatgtggaatgtcccggtgggaccacttgtcttcgattaggtgagagatgtctaggaagttctcagggataaatttacgatatcagatgcgagtccttttgtcattcgttgagctccgatgatatttgcctccgctaggatttgggataccggtgagagaaaggaaaagaactgcccaatatcaatttcctagaagagcctcaccctaggaaactctaccaatctgatttaactaaagtaaggttcaccatccacgtggaacaataaaaagcggaaataggctaagcccgaagggaaactcctgtccgaaccactaccggaaacagcaataagtcatatgagtccatatgagtccgaagtacggagtagcgaagaagagacatgtcgaatgagcactgaccgtgcccaggtggacacttttacgctaaggcaaagctgtgaatcatctcgactgctaaagctaagctacagtgtgactatgttgtgtatagatccgaatttgccgagtccagactgacagcaaaaaacgaaaaaaaaaatctcttctcttccaagacctgaaaataaacaaaattcccgatggtcgccgagaaacttggaaggaacaaaggaaccttggaacgaacctaggaaccttccaaagttggaaaggcccgagagcggtccaaacacgcgggatttgatttttaggattgatctgataatcttcatctgataagatggaaggcgaaagtgtgcctggtaaccttatatccaggaacgatcttcctgttcatcgctcctcgttgatatatactcgatctgcaagtctacaaatttttcatgaaaaggtcatctctgtgtcccatgacagcctgctgatctcgggtggagctccgaaagcatctgattacctgcctctctccacttggcgcaaaataagcccttagcggccaaaatgcttgcattctaattgggagtctgacgggctggattaatctatcatgctttcggggtctatgaggggacctgacttttatttgaatatggcaggttcccctatgcttattgatacccttggatattccaagccatatctatatgtactctacttctaatgttgtagatagaattttacatttgagtacatatgctaggtatgcataagacaaaaagcctgggacgataatagaatgcaaaaaaaaggaaggggaaaaaaaaaacaatcggcctgccgcgactgccggcaaactagagagttagccaaactaaccgaaactggagacactcggatttggccgatgagtctgtaaaccaatcattgcacagtattttatcggcatcattcagccgtgagaagcattggtgaatcccacacacttccaggttgagtggcgtgtcggctggtccgttgttagagtcttaattccatggcttggggtatctgatccgtttatctccgggactttggtggactaaccggtcctggctattccgtgcaccttgtaaggttcatggttagcttccaaaaggattcaactcactaaaaaactctttagatgctccatcccccatatatagctggactccccgagtgtacctcttctttccttttctttctcatattctcaatctttttttcggagctccctatactgtagtcatgggtgtcttcgatctgattcgtggtcggaaggaccaggtggtcgtcgaggatctgcgcccaactcaaggaaatgagaagcccgatatcaatgtggagcaaaacacggtggacgatcatctgaacaacctgggccgtgcagagaaggagatcgaggaacatcctgaccaggtcaccgcgaatactgcagatggtgtgcgcaaggctgaggctgttgctttggtctggagcaagccggctgtttacgcgacatatgcctggtaagtactatggatgagaacggcatatgaactagaatctcacatctacaggatctggatctgtttctttatgttggctttgcattcctctatcggttccaacgttctctactatgcctactccaacttccaggatgcttctcaggtcagcacggccaccattctggcaagtatcgtcggtggagttctcaagcttcccatcggaaagatcttgactctatggggacgtgcagaaggtctcatcatcttcacaaccgtgtatattctcggcattatcatccttgctgcttgtaacaacgccaacagttacgctgccggttacgttctgtactgggttggatatgatgcgatctacataatcctggacatctttattgccgatacttcgggcatgcgcaaccgtgctttcgcctttgcatttgcctccacaccattcatttgcacttcattcacgggtccactggctgctgcgaatttcctgaagacttcaaactggcgatgggcctatggtgcctttgctattatcatgccctttgtcttcctgcctctggccggtgtcttcaagtattatgaaatcaaggcccggaagatgggtgttttgcagcgcccagttagcggcaggactactatgcaatctatcattcactacttgcacgagttcgacagtgcgtatatatcttcccttctgtcctccacctatcactgaccaaatttttagttgtcggtgccttccttctaatggcggctttcatcttgttcctccttcccttcagcttggccaactatggccgtgcccagtacgccgaagccagctttatcgcgcccctggttattggcttctgcctcttctttgtctttgcggcctgggaaaaatggatcgcccgcacccacttcatcccctaccagctcttcaaagaccgcaccgtcctcggcgcctgctgtctctccgctatcctctatttcagcttctactcctgggatctatactactactactttgtgatggtcgtatacaacctcgatgtcacgatgaccggatacatgacagcgatttacaccgtgggatcctgcttctggtccccgatcttcggcatctggatccgctacgttaaggagttcaagtacagctgcctcttctttgctctaccattgatgatcctcggcgccggcttgatgatccacttccgcggctcggacggcgatattgggtacgtgatcatgtgccagatcttcattgccttctctggaggtatgttggtcatcggcgagcagatggccgtcatgtgcgcgtctgaccgtgagggcatccccatgatgatctcgctggtttccttgttctcgaacttgggcggtgccattggctatgccgtctccgctgccatctacgccaataccttcccccagggactgcgcgatgccttgcctgagagtgccaaggatcagtgggctaccatctattccggtggctatgttactcaaatgcagtatctacccggcactccggagcgtgacgcgatcaacttcgcctacggatacagtcagaagtatggctgcatttctgcgacggcgattcttgcgcttgctatcccctgtattggtatgtggagacattacagggtggacaaggagcagaacaagggcactgttctctagatctggagatgaatgaggacacatgatgtgtccaaatggtggatgtttatgacttttcaaaaataattcttacatgtatcctgttaacttactagcgagatacaatgtaattttcctcgtttagactgtttttccactgatagttcgctaatacttctagtagaagtcctccgaaggcgactactttcatgccagtattccggaccatggtggctaaggcatatgctaagttttggatttatttccacccaatgcttttagagcagaccgaaaatgaagatgcagacgccacagcactgtcattggcgcgtagcagataccaggtgatcacgggccaccgaaggtgagattgggagattgcagggccagacggggtctgggggatatcccatgaagaaagtgctaaaagtacgatactagttatactgttccttctttctcaccgtgtactgtgtcctatgtacatatgtgctactactataaccctaaaaggacaggaagagggagtttaccatatccaaggaccacgtgacgatccccctcgagacatcacaatcaatataatcaaaggccatttgatattatcacttcaagcattcttggtgagttccattcgcttccgaaatacgatcggaagtaaggagttgtggtgttctgtgctcgcttccacttgcttgaattccattcgccttttaaccttccaatcttccaatctttcgacccaatcgcgtcgccatcacaaaaccgcaggtggctaaccatgtactgagttcgcaagagcttttctttatttcagtcaatcatctttagattgtcttggcctgggaccagcccgtcgcgcgatttcagtctgttctgcaatcccaagcgctgcgataacatcggcaacgacgccgaaccaaaccatgtcaactcacgcactgaggatctaaattcgttccatttctgcccgtccgaagcgaccaccgagatcgagtatccggccctcaaatccgaccgcttgtttggcgctgggacgtctagcatgatgcgttaatgatcctacctgaacaaccccgaaaaccaccttcgtccgaacctcccctggacgtcgcagtcgagacagcgggatataactgcaattaatagccagatccagtgcatcgggcatcacaatggatggacgtcaacagtatgtcccggggcccccgccttcctctcagacacaacaacatatgaacctgcctccccctccacctcgacatccacaagcccaaacgctggtgccaccacctcctcctggcccgccccctggcccgcctccaggagcgacctatggaactccgacaggatggcagcaaaactgggccagaccggcgctgaacccaggcttcccaccgccgccccctcttgcccccgcaccaaaccagcatctaacatacggtcgcccaccagcgcacttgtcgatcgttcctccgcgccatgaccatcagcctctgacatccgcaacttatatacccgggaacgatactattggcgtcggcattccggggttgttcgaccccaatggaagagctcatccgtacgcgcacaccaatgccgagagacaacggttgggtctcagccaaatgcaagatcacatcaatactccaaccccgtataaaccagatacaagtcttccgcagagccccggggcccgcaccgtttcttcgccgtacgctcttcataacaacattcatgaattaacgtccaacgacagtccgcagcaacaggcgacagctccaactaccgagcttactaaaacgacaagtcatcgttacaatgctagcggtacttcgctgggcggtttatctcacagcgaagcggcgatccagtggccattggatcgcgtgctcatctggcttgcgaaaaatggattttccaacgactggcaggaaacattcaaatctttggagcttgaaggggctgacttcctcgaacttggacatggatccggcggacgaggaaacctcgggaaaatgcatcaagtggtttatcctcaattgtccaaggaggttggccggagtggcaaaaaatgggaacctggccgggaacgagatgaagggaagcgtatgcgcaaactcatccgtcaaatacatgatggttcgcaagactacaccgtcactaccccactgaatcagacgcagccgccggcgactgcgttccctgagaacagtgcggcttacttttcttctaaattttccgagccacgttcggctggccctatccctggtgtcaatgatgtgagtcaggatcatctgagtgcattgcacgcctccaatcaagcccaaaagcagcctgggcaacgctcggttaccatgccggtctctgctggccacgattcgcctagaaaaaatgagtctccggcacgagaaaactgggcgcgatctgactattcgcggtcagagtatacccgcaatgccctatccggaataaacagcgaccatcgacgccagagttcgtccattggcagcgaatcgggcaattttcagggagcatctcttcggccacatgaagaaagtccaattagtggcagcccagccatgcagaatgtgtcacccgcttatgcaggagcattttcatcatccactggggatctgacgttgagaccgtatgatcactctcggggcaatagcaccgaatcgatcaatcggggcgctacaggccggtactacgattcacgtagacaaggccatgaacatgaatctcgcaggctaggccaagagggtactcgtccctcgcctcaagatgcctccagtcgacaatggaatgaccaaacctcgtcttcgtactccaaagaacacaagggctttttctctaatattctgaagaagaagacaagaactacggcttctagccacccgtcccccgatcatcagcatgaagactcgtcgcctacgacaagcccggagactcgcccgaatgaagcctatctcccttacataaagccttcttacaacactagcgacatgtcggtcggtgagcgtccatccacggcgataacaaggacaaagaaatggatatttgccaccacggatggcttgaactaccgtctgattgacatcaccgatctcgactctttcgagtcattgcgtaccgggatctgtgaaagcctctcgatcgacccgagcaatgcgcagatttaccttactcagcccgggcaaagcgagcatgatgatcctatgagtgacgcataccttgcacagtcgcgtcgaaacaagtcagatgcatacggttctctcaagctgtttgtacgagggactcctatgcttcctatgccaccccatactcctcgagttgatggcttgggagtttctttcatagaaaagtccaatatgtccccgacggcaacacaccaccaggtccaccggaagcccttggatgaagatgcccttaacaggttatcaccgcaccgcaccagaccagagtctccattgttgggctctcggcaaagcactctcaaggcttctacagggaagccatccccggcggagaccgtacaggacgcaagccaagctcttgggtctgacaaatccgatttactcgctcgccatgaggaacacctccgtgaggtcgaacgtaaacaaaaacaatatttacaatctaaaatgccgctgcaaaacaagaacgcctacagtgacaccgggtacaggcgaaacgaagtcattgactttgatagtcctcgtatatcgccttatgacgaaaagaagggagattcgcttgtaccacttcgtaaacctcccacagcgccaatcgagtccaacactcttaccaaggtcaattctctcagcaggagacccaccactcgtgaacctcgtgaagctcggatacagccgtccctgggcgctgcaattgctagcgttggccgcattacaagtgcagttggcacgccattgccttcggtaccggctccatctacgccttcagccaacactcaaaacagtgcaatctccgagtctgatcgaccaggggcatttgattctggaaccttttcaagcagaacacccctgggtcagtacatgcacgacacagcgcggtctgatcgaccttcctctgactaccttccagactcttcgagacccacttcgaagatgactacagaacgcgagaaaccgccagtctcgtttgccgatcagtcacccgaaaaggcttttggtgaagactcgccgagacctggcttgcaaactcgcaagtcgttcggtccagagttcgactttgaagagaatcaagtatccttccagcgaaccccccaacagcagcaagactcagatgacgattctgatgatgactcggacgatggcctattccaagtccgaccttcaagggttcaggaagaaccgaaacaaacacaaaccgaggccgaaaagaaggcggagaggccatcgctgaccgtgaacacgaaagatcaattaagatcaaagttatctgtcaggttcaaatctccgagtactgccggtcctagttccggcggagaggcatctgatgggaaggaaccggtttccagtacctggggaccagtctcgcctgaagatgagaggcctggaccacagcgagagtcatttgctcgagatatctgggcaagcagacctgccgtcgaaggcgttattgaccacctcgatgacttcttccctgatgttgatcttgacgctccatacttggatgagccctcatcacccagtagcaagactatcaacgaacatgacgcgaacctcaaagacaagaaggaagtaccgccacccatgccaaatgcaccccatgcgcctgatacagcgccagtgagaccgcccgaacctgccaactttgctcgacagaaacttgctcgtggtggtgtcggtggcggcggactctctcgcatgaaatctattcgacaggtggcccaaggagcgaaccggacgaacagcgttcatgctggtccgcaaaggtcgggtgatcttctacgccgaaagagtaccaagatgttcggcgccaaaattatgcaaatcaggccgaggccaggtacccggcttagccaactcgatccgattccgcaaaacagcgcccaactggcgtccaatgccgggcctgttcctcagcgacagcccactttccgcattatccgtggtcagctcatcggcaagggtacttacggtcgcgtatacctaggcatgaacgccgacaatggtgaagttttggcagtcaaactggttgagatcaatccgcgaattgcaggggcagacaaagaccgcatcaaggagatggtcgctgccctggaccaggagatcgacacgatgcagcacctcgaacaccctaacatcgtgcagtatcttggatgcgagcgcggcgaattttccatctccatctacctcgagtatatctccggtggatctgtcggaagctgtctgcgcaagcacggcaaattcgaagaaagtgtggtgagatcactgacgcggcagaccctggacggactggcatacctgcacgacaagggaatcctccaccgcgacctgaaagcagacaacatcctcctggatctcgatggcacgtgcaagatctctgactttggtatatctaagaaaacggacgacatctacggcaatgactcgtccaactccatgcagggctccgtcttttggatggccccggaggtcatccagtcacagggtcaaggctacagtgccaaggtcgatatctggtcccttggctgtgtggtgctggagatgttcgcgggccgtcgaccgtggagcaaggaggaggctatcggcgctatcttcaaactcggcagtctgagccaggctccaccgattccggatgatgtttctatgaacattagtcctgcggctcttgcattcatgtatgattgcttcacaatgtatgtcttcgtctgatttgttcttggatcgcctgattatatttactaacgtcctccagtgactcggctgaacgtcctactgccggaaccctgctcacccgccatcccttctgcgagtcggatccgaactacaacttcctagatacggaattgtattccaagattcgcgatgttctttgagttcccttggtttgatttcttctttgactgggttcggcgtaacttaacgactttgcgctttctcctatcgaccgtacatacccttttcttttacatgcttgaggccaaatttcgtctggattctttcggctttctgatcagctgtacatacttttttcacgtttgtggataataacatttaccggggaaactagattatttccctctttacggtccaattgtgatacgctacaatatcatcaagctgctatgaccaaccaacaagaatttatacaattcctcgctttagacatgtacagaagtgctcaattcaacatggtatctatgctcaagaaggggatataaaacaaaaaggtcataagaacgagtccaatcctaagagctggtgcttaggagatcatcatcgtcctcggggatatcggcctgcaacccagcgacaccgacgcggaacacaccctcacaccattcggcaaaggtattaacatcccagacagcatcgtcccgacccttccctttcttactaacaaaattgcccttcgccttctcggaggaagtatacttttcaaagaaatcctcgtaaatctgaatagtgcggtcctggaccgccccaacaagcgtctctttcatacgcgtgtcgtcgatatactcattcaagaccttgcgcaaacccggcacctccttctcgatagtgcggcaagaaggaaggataagttcgccgcgggcaaggttacgggaatcgatgaattgagccggcagcgaggcggtcatgcgagcagcaaaggcattgatgaagtcattgataaccgtgcgaaggcgaccatcaagctcgactttcgcgtcgagcatgttctccacgacccgcgggatgaggccgtggcccaccaggcgcatcagattacgcgggttgaagaggccgccgcgttcgcgcagctcccagaatgtacttgtcatgccggagaagtcgaaggagatatcggcggagacatattcgatgtcgaaggcgacgatttgttgctttaggattaggaggtggctcattaggaagagttggctgtcggctggtgtggctttggcggctattagggtgctagcgttttggagagagagggttgtttggtgcacgatttggtgagctaaatcgtcgaagacagtggactagggtggtcagtatgggtgggtaattaggcctgttgcggggaggcatcttacattcactaggcggtatattcgactcagaagccatattgcttttcgcagggttggataccagcccttcagagcggtctgcgtctcaaagtcccatttaccgtctagctcttgtgtagattcgcctgtgtcatcgccttgtttggccgtcatgtcgactagtgtatccgcggatgtgtccttcttgcccgatatctgagtatctgacacagttagggatacctgtcgatttcgcatggggtaatcagtgtcctctgggcgaggtttgtatcgttcgatttcgtcgcgcagaacagctagagcacggaagacaagccgggcctggacgtcttgtaaagcgggctggatcaaaatagaaaagtcaagatggttcgtttcaacctgttcgagttcttcttctgggtccgagaaatagcgagtctgcagtagattgcacagctgacatagtctgacgatatcagactcgtgaatgatccgtggacgaaggtgatcataaagtggttcgcatagcgtctcaaggaagtcatataaacctccctgtccgtggaaccattctccccatagatcatattcgtctaggcataggccacggatataactgatgctagctcgagcaaaggcaaccaggtccttggacgaactaggtgtctgtgtgatttcgccgagctttttgcgagcgagcggaagtatcagcttcgcacgggtagccgagtaattgctgtgcagctcgttcatcaggctttgatattcagcttcgttattttgatctgggttgagcggtggtacggctctcttttgaatctcgactccaatctgcttcagttcaggtgccccaaccctaaatttagcgtacaggagagccgacagagctgtgtcattcaattgctgatccgatatctttttggagacgctctggtaaatatccttaagtgaagatacaaagttgccgcggataagcgtcaaggcacgcgttagcagtagccggtatctcgagcgatatacctctgcctctttttgatccggctgcgtagagatcagcgatgcgcatgaatatccccgacttgcttactcacatgtgtttccatgtaatccaagcacacgtccagatgcctcaacatatctgagaattccttgtcgcgaactgtattacccgcgccgggagcattcaaccgccgcgatgcgggatctaagaagtcataatagtggaggttggtttggataccattcgcaagtttcgtatcccgttcctgggcagacaaaaggccttggcattgcttctcgaaattccatgtttgtgtctcgaccgatttgaatgattcggacaagctggataggtcacccagaagggtcagggtgttcgttaagatttcgtcaatgtgctcttttgattgttcaagttcatccaagcaattcctttaaagaaatgaattagtacgcctccgataaccgtccaatgtcaatcgtactggtactcgtcatagctctcctcaatcaagtcacccttgacaccattaaaccactgtgaaaactcaaattcgttgctccatcctgccgttttccattcaaaagcaccgggcggcttctcgtccaatgcttggaggcttgattgggtttctttggcggtgggtttgcgcggcgggccggagggagcggtttggcggcgggcacgctgctgctttgtggaaggcatagtgtggtcaaggcccagagagtgcgatgggagtcaacctgcagctcatatctctctaccgactttattctgagtaaaattcaggccaagtttgatgttgaagccgaactgcgatgtgttcaactccgagacggattctgccgatagctcccgcctagattgctgcaacaaatcacaggcccggcattaagagcttccccggacataatctcacctttccagcttcggtatgctctacctggtgattcagcaataatctacaatgttcacaacccaactgcgacggcccgcgacgcactccgtcctcgctttccgcccactcagaaactcgacggctcagtcactaaatgcgccatggtcccgatctgccagcagtaaatcgcgaaaggcaggcccgtcatcgcactggattcgcaattccctcgggtttgccgtgacaggaactgcagtctttttgggatactcatacgtggctgatggtggaaaggaggcttggttcagtcgtccgcaggttataaagaaagagcccgttgacgtcaacgatctcgaagctcagttcgtccaagaaaaacgaagcctgaaaagccccggcgtctacacatgggggtcgaacgtttatcgcgtggtggatccaggatctaaagataccgatatcaagactcctcggcgcttcaaatactttaatggccaggttctgagggatctcaagatcgaggaaaagtccggtgcagcaatcaccgagaatggagatctagtgcaatggggccaggcgttctcggagtcggacttcaaacccacggtaactctgactggcaggaatctcacctcactcgttctgtccgaaagtcgaatcattgcgctgtcctcggatgggactgtatactcactgcccacatccaaggatgggcaaaacaccggcccaaagacaacggaaagctcttgggttcccttctggcccaatcagtctaatctgagctaccgtgtactgaacccatctttgaagcttggtgaaaaggtcaccgcaatcagtggaggacaggaacatgtgctgcttctcacaagctctggtcgagtcttctctgcggcgtcatccaccgaaaattacccttcgctaggtcaactcggtgtggagggacttacctggttcaccagacccaaggggccagcagataaatgccatgaagttacagctctcaaaggctccaagattgtgcaaattgcctgtggtgactaccactcactggcgctaagcaaagatggccgtatgtttggctttggcgacaactcatttggccaactaggtgtggattttgaagctgagaggtctttcaaggatgctcctttcgaaatcaaggctcaaaaactctatagcagaaaccgctatctgcccaaggttaccagcattgctgctggtggcgccaacaccttcttctccgttgatgccaagcgcattctagggtacgaagaagaggcagccgatgttcatgatcttggaaatgtaactgcagacacatgggcctgtggtaggggaatttggggtactctcggcaatggcagatgggttcacctgcaggattcgcctaccaaggtgaaagctttaagtggtgtgagcgagtatgacgagaagacaaaacaaatgacccctatccgcattaggtccatgtctgtcggtacaacacatgtcgcggctatcctggacaacaagaccaatgtcaccaagactatcaaggacactttggatcaaactaaagactggggctatgatgtactctggtggggaggcaacgagcatttccagctggggacaggaaagcgaagcaatcaatccaagcctacttacatcaacgcaccccccgaaaacaagaaaagccagggcgaggcgcgattgcagatcatgcctcgtcacaagggcaaggtcgggaagcgcaatgtgagcatggaacagcgtgttgaatgtgggcgtcatgtctctgccatttattctgcggtgtaaaggtaaaaaaaaaaacctgtatattagtgatgccatatgaaatgcaattataattcgctttactcggtcggcctgttgtttttcttttggtctatagaatcaatcaatggatggcggcaattgcaaacagaccaaacgcttatcaccgcggagacgcttggaccaccgcttatccaaaaaatttccagcgcttcaagaccatcttctctcacgacacacctccataatgcctcgtgaacaacaaaaaagaggccgcagggccgagaagaaagcccaaaaagaggactccaagagaaagttcgaggaaacccccgaagatcccgtcgcgaagcggatgaagccctctgccgacgacaccaacgagaccaacgatgatatccaaattgccggaaatgaggactacattccccttgacccgggcgaagagcaggaagctcagcgacctgatgaggatggagacatgcctttctacggtcttctagacgaggaggagtcagaatacttccagcgcgccaacgaaatgctggagctgaaccagttccaggacgccgaagagcgcagcttgtttgtcgacagtgtatacactgaagctagtggcaaggagttgaaaattgcctgcagtcagggctgttcgcgactcatggagaaattgatctcaatgtccgacgctcgacaattgcgccggatattcagcaaatttatcggccacttcctccacctagtgcagcatcgttttgcgagtcattgctgtgagacgcttttcattcacgctgcgcctgctgtgatgcaaaaggtgaaacctcagcccaaaaagtcagacgaggaaggagaggaagagccggagctatcgatcgcagaaatgttcatggctgttattgaggaattgaaggaaaattgggggtacctgttgacggagcgctttgcgtcgcatacaatccgagtgctactgcttgttcttgcgggcgagccggtggatgtcacgtcaaacgagtcgtttgtcgcaagtcgcaagaaggaaagaattgagatcccgactgtccagggcgaagagaaggcagcaaaatccaaagccgagaaacacactgttccagagacattcgaaccggcgctcaagaagatcatgaccgatatggttgccggtctcgacgatgtttatctccgagctctagctacgcacccagttggaaaccccgtacttcaggtattgttgttcttggaactttcgcatttcggaaagtctagcgccaaagatcccaagtcgaccatccggagactggttcccgatgagacgtttgaggaagattccgaaagcgctgttttcattcgtggtctcctctacgatccagtgggttctcgcctgctagagacgatggtgcgatacctccctggtaaatcattcaaaaacctttacaagaacaacctgggtgaccgaattggttccctttctcgcaatagcactgctggatatgttgttcttcggatgctcgaaagactcggtaaggatgacttgaagatcgccatgaccaacatcatccccgaaattccgggcctaattgaacggtcaagactgattgttcccaaaatgttgatcgagcggtgtgtggtccgtggcgtcgacacaaagcctcttgccgaagcactcgagggtgcttatagccaggaccctgttgtcagactgcagcagatgctcaagttcaacatctcggagagcacagccccggaacctgaagaccatgatatggacgaggacaacgatggaaaggaccgcaagccacggggcccacccccagtatctgcggcggagaaagccgagaaactgcatggctctctgttagtacaggccatgttgaccgttcctggcccgctgagccaacttgtctacacgagtctcctcgcccaatcatccgaaaccatcgtacaacttgcccaagaacccacctcttcccgcgttctccaacaggctctgacttctacaacctccacgcctcaaatccggcgacaactcaccacccgtttccagggtcatctcacacctcttgccttgagcagcagcgggtcacacgtagtggatgcgctttggactgcaaccaaggacatcttctttgtcaaggagcgcatggcgcaagaactcgagcagcatgaacaggagctccgtgactcctttgttggtcgtgcagtctggcgaaactggtcaatggatctcttcaagcgccgccgacgcgattggactcacaaggccaagggctttgaggagcgaaccgaggccagtgaaggtgccgaacgtcccaagtctaaactagaacaggcccgggcccgttatgcggcagcaaaggaagcagccgatgctggtgctactggtgcaaaccagactgcggtggctagcagatgaagtggtacaatggtgatcaaaaatttatattagacgaaatgcacatgtactcataaaaaggcgttgatgcattcaattgtttcattgctttatatctatttccatacctttcttatgaatcgatattatatttcaaaacatatcagagatatcttagaaaattgataaattgtatatagttcatcgaccacaataccgtgagggtattcgggttcctgcagatcagcccgaatcttaatatccttgtctgcatataatatatgcaaggaatctacggagtagttaattgggagtatacaaactcaaaactacatgaaaatccgactcaaaaacattctactagccgagtatagatcatcgcatgagggcttaaggtacggatgatgtcaggctctgcgggattgtcgccatttccgtggtcgccggtaaacttttctttccttttcaattgcgtcttctgtcctctttttcttttctgtttcttctgtatagaatttgcactgtctctccttaaatttgcatatactagaacgtgagaatctgtacaaatgtctggcattgcgcagcccaatcgcgctgatgaagtgcaaagtgtgagtcaactctatatcgcaatgatctacaccccaccagattctttattcgatgttctgaaactaatgcgagcaccatgctcagcttctgaaagcggtggaagaccttctcatcccctttatccgatccgcagacgaggatccccgcgggtccttgacacagaaaaatggcaccaacggcaccaatggacacactggactcgttggaacctcattgatagattataagaagcctgaagagctgcaggatatccttcagcttgagatcccagagaaaggcaccaagcaggaaggtctcattgaagtcttgaaaaaggttctgcaatactcggtcaacacctggcaccagggatttttggacaagctgtatgcgtcaaccaatgcgcccggcgtggcagcagagctcatacttgctaccttgaacaccaacgtacacgtctaccaagtgtcccctgcgctgacggtcattgagaaatataccggccagcggttggcgaacctcttcgggctgaacggtccacaggcgggaggcatttccgtgcagggcggatccgcatcgaacaccacctccattgtcattgcgcgaaacaacctataccccagcacgaagacagacgggaacggcgggtacaagttcgtgctcttcacgagcgcacacggccactacagcgtggaaaaggcagcgcagatgctcgggttcggcagcagtgctgtctggcctgttcctgttgacaaggtcggccgcatgatcccagccgagcttgagaaactggttcagaaggcgcagagcgaaggccggacgccgttctatgtcaatgccaccgcaggcacaaccgtcctaggctctttcgaccccttcaacgaaatcgcagccatttgcgaaaaatacaacctgtggttccacattgacggatcctggggtggctcgttcgttttctcccagcgccagaagcataagctagctggcgcagagaaagcaaacagcatcggcattaatccgcacaaaatgcttggcgttccggtcacctgctcttacctgctagcctcggatatacgccagttccacaaggccaacacacttcccgcggggtacctattccacagcgaagaagacgagcccgctaccaacggcgacgcaaacaaagaatccgagttggaagtcgactcaccggaagtgtgggatctagcagacctcactctccaatgtggtcgacgtgcggattcgttgaagctgtttttgggttggacatactatggcaatgagggctaccgacagcagatcgactcggcatgcgacatcgctgcgcacttggctaataccatcgcgcaacatcctgatttcgttcttattagcgaaaaccctccgccctgtctgcaggtgtgcttttactacgcgccaggcaagaagttcgtgtacccgcgtggcatcgtctcgaatgagacacagcgcgggaagaataacagcaaggtcactgagcaggtgacgcgtgcaatcgtgcccaagggcttcatggtggactttgcgcctcccagtggagaggaggacgaggatgcagctgggaatgggaagttcttccggtgcgtggtgaatgtccagacgacgaaggagaccgttgattcgcttatccgcgccatcgaagaggtgggtcctggtattattgagtctttgaaggcgagcaacccggcgcttccgcacaagcggcctggtgagcgtggacacggacctgttgtccatcgcgcttgagcaggtgcgtgatttgttttcttctgatttacttggtatataaagtagagcatgtggatatgagagatgggatacgacatacaaaagatctggtgaaatatataaagctgtgtatcaatttgacaccctaagaacaagatgagcgaatatctcggcgctcaaaatgcagaggatgtagagcagtcggcatagtttctaactatacctacctggacagtagtaatagaatttgtgcaaggagaatagcttgagtatagaatgatatcaaagccatcaattgccaatctcgacccttcgttccaacacggaccgagcctcagcttccgatagagagtcaatctctaattcagcaagcacagcccgtgcactctcgttgtccctgaacaacctcttttccacatcccatagccttaaaggcacatcttcctctgtagagacgtccccctcttgcttagctgtacttaagcaaagtatacgcagtccctcgttgagctttttgatggttcgcaatgagatccccacctggctagatgcgccgagcgcagaatccacaacgtgacagagatagtcgacatcgctcgcaagctgggccgctccagtctcggaaaaggtatgtttggtcaagacgttgtcccagatattgctctggatcgataacaggagctggcgcgagactcgtcgtagaggcgcagttccgagcgcccgagagaggaaggatagttgtgcggacaagacacgcattgcaggggcgagatcagaagtgggtgggaggggagatgccgtcgctgtggcagaagggggtgacagcgttgcccacgtagatacacgagagtagggcttcagagccgcgaggatattggaggacaaggtggatgtgatgatagtttccgagcgaagtcggagacgacggtaggcggatgccgtctcatcgaagagagcaccatcggatgaggtcgcggtgtggccgccgttgttgttattagcgactgcgggtgacgtacgcgacgctacctctgcgacagacatagtaccagctacgctgcgaccgttgtctcggttttgttgaacccgatcttggagctcggaccagagctcaacgaagaacacatcattactccaatcctccatcttcttttcgaggtattcggcacttccgaaaaccctacaaagccgctccagtccggcgacaccctcgacgctggcttgcccatcggcgccctgtacagtgcgtccaagcgttgacgtcatcgcaaggtaggcctctagtgcagaatagaggcgctcatggaactggtcgaaaatcgtgatttgaatgtcaatgagaaaccgcagcttctgactaaaggaggatagtggttgatagcgatcggttatagtttcgagaaggtcattcacgcggatcgcagcctttgtcggtttcgttgcagtgagctccatgccatcgtagtcgatctctccactgtccgcggtgtcgatgatatctctgtatcgcgccaatgcgaagttcttctcaacctgaagccatcgatcataccagccctgtttggtcaacacttcccaggttatgcccttccaattgtcgtccgcatatggatctggcgtatagttccatgtttctcgcatctcgttatcgaatttcatcagttcatgaatgaattggctgagcaattgggggtagtttgagatttgagggaggaacaggctgatcttatctctcagcataggaagcaatgcagtaatgtaactatgtgatgcattgtaaaagttccattctagacttggaccgactgcttcggccctttcatcaaagatgggctgcaagtaagacacaaaaaacccgccgtattggttgacaaggtccatgatgtgcgagaggaaatattccggctagaacccaagttagacttctattttgcgtagagctagggacaagttaccttatccagtcggtttgttggcttgtctccactaaagtgatatttgaagcggagatcgagatgatgcaccataacctctagtgggaatagcactgggggctcgaagttcagttcggaagctagtgcatcccggctttggagttcactaaaaggggcgtgttagaacatttcccagacatgaagggacataccatacggtaattgtaagtcgatcaacagttcaacatcttgcttccagcggctcaggagctggtcggtgacattcagttctcttgtcggccatttcatatcttccagcgttttctgtagccggtcaccaaagtatttcttcatctgttgtctcagtgcagatgccagtttgtctgtatagtcgacaagatggggggccgctccttcggcagcaggctgggcatccttcagtagtccgacgatagttcgtagtcgggaataaggcttcaaagcggcgcgtggttcggatgtaatgtcttccaaagcttgcttgctgtattgctgtctcagtatgaagtccctcacgaatgatcaagtgggcactacctcaattcctcggcttccttgagcaactccacatatcccttggataattcaagccgctggagcttctccatgctcttctccaaactccgtactgcctcatcactggtttcggattgtgtgatggccattaaacgtcggtcgatgtccgcttgctccgcagtgaacgcctcggcttgctttcgagtggcttcggcatggtcattagaggcttttgtcgcatttgagagtgcttcgctggcttccgctagctatttggtcgcgagtttgcatcagtagtgtttagaaagagggtcatggctgtgaggggcggtacctgcttccgctgaagctcctgtagcgcgcgtagactggacaacagcgaacctaaactctccagatcggcagaaacctgaatcttatcatttaaataatcttcgacccgagtccgctcatgcgaagataattccgtgagggaggccattgttgaaggagggaacttgaccgcggaagcgcaaggtgtcgcgaatgttgatctccgccttttggactgacgtcttccccagtggcaaccatgagcttttacattgtcaacactttgaataatgtccagtccagccaagaagcgaaaaagaaatggagaatcatcgcagccgacgcgcagtatcaagtcgttctttaaaggacagaccactgaacaagccaatctacaaggccccgatgtcactgagcaaaggctctctgatgaagctcttgcgcgcaagctacaggctgagtggaatgagcaggaaaatgcaagcactcctaccgatgccaaagcagatccacagatcaatccagttccatctacattagactcgcctgttttacccccggtagcgccagtgataccaaggaagagcactctctcattacagtcatcatctggtacggaggatacaatatccctttcgattcctcttgatcaaagcccccagaccttcgacgcgagtaaatacgcagcagaactgcggtcgcactgggcaaccgaaggcggagatgcttcttacgccttgttaacgagagcctttatcctggcaaatgcaacgaccagtcgaataaggattgttgatacgctggtcaactttcttcgagttctgatagaaggtgatccatcaagtgtcctgcctgctgtgtggctcgcaacaaattctatatcacctccatacgatgaattagagctaggcctgggagggtcttcaatttccaaggcactgaaaaagatatacggcctcaatagccaagggctaaagaccctatacgataagcacggcgatgcaggggatgttgcattcgaagccaagaaacgacaatcattcactctggttaagccgaagccattaaggatcaagggggtataccagtcgctgaagaaaatcgccactagcaaaggacctggtagtcaagaaaccaagcagaggatcgtggagaagcttctacaggatgcgcgcggcgccgaggagagtcgatacattgtccggacattggtccagaatctgcgaattggcgcagtcaagacgacgatgctcattgctctcgcacgggctgtcttatattccaagccagccgaggcagatttcgaggtgcgtccgtcgcatcaacttgcacgcttgaagaaggacgaacttgcggaaatctacagcaatgcggaagaaatcgtcaaggcgtcgtacgctagacatcctgattacaatgatttggtaccctgcttattagagatcgggcccacagaagagcttttgatcagatgcggcctaaacatgcacattccactaaggccaatgctgggcagcatcacacgcgatctgtcggagatgttgacgaagctccaagaccgagacttcagctgcgagtacaaatatgatggacaacgtgcgcaggtacactgcgacgagcaaggaaaagtttctatcttctcgcgtcatcttgaaatcatgacggagaagtatccagaccttgtgtctttggttccgcaaatacgaggagaaggcgtgtccagttttatcctggagggggaagtagttgccgtggaccgtgagaatggcgatcttaagccatttcaagttctgaccaatcgtgcaaagaagaacgttgaaatcggagacatcaaagtcaatgtctgtcttttcgcattcgacctaatgtatctcaacggggagcctttgctagatcgcccctttcgagaacgccgcgagctacttcgcagtctctttgtagagattccacaacacttcggctgggtgaagagcatagatgcgacatcggcagattctgagcctgtccttgaattcttcaaatccgccctcgacgtcaagtgcgagggcatcatggtgaaaatcctcgacaaccagcccggcgcgaataccaacaacctctcctccgaaacagatatcacaatcatcgagccatcaactccagcaacatccgacccaaccaaccccaaacccaaggtaaaactcacccgacgcaaacccctcctctcaacctacgaaccagacaaacgcctcgaatcctggctcaaagtaaaaaaggactacagcacctcctccgaaaccctcgacctaattccgatagccgggtggcacggccaaggccgcaaagcgaaatggtggtccccaatcctcctagcagtccgcaacccagaaaccggctccctggaagccgtaacgaaatgcatgtccggtttcacggacaaattctaccaaagcaacaaggaaaagtacgcgcagggcagcacaaacgtcatctcgcgtcccagctacgtcgagtaccacggcgaaccagacgtgtggtttgagccgtgcgaggtgtgggaaatggctttcgcggatatcacgctcagtcctacgtatccagctgctatcgggctggttagcgaggagcgcgggttaagtctgcgcttcccgcgatttatcggcgttcgtgaggataagtctattgacgaggctacctcgtcggattatctggcgttgctgtggcggaagcagatggagcggacggcggaggctcggggcgttggggaggttctggaggaggggatggagtagacaaggttatttgcctgttcatataaacaagctcatgtgaattgcctttcttggtactccatgcagcacctttgactgcaagaatagaccttctatgatctaataatatcggagatgctatatacatctcaacatccccctcactccgtaagtgtaaactattctcaatggtatatttccctttgaaatattttttgtcgacatggccccgtgtaaaccatttcgatatcttcctctctacgcgctctaataacctccgtgctagtggcggaatccaagcaaaataggcttcagatgacatcacatttgactttcagtcccctcacctctgattggctgaccccaaagcttcttaatctgcgacgcgaaagtgacgcgaaaagacgcgaccggattggacgtgaaaatgaggggttgactacgtggtccaaagaaaatagtcgcttccaggcgatcagagatagggaagtctgtgtctatgctgggatgctatgccgctccagggtgatctaaattaagatgtgtagtagggtttaggtgttgtggtaataagcattggacctcatttctcgaggttgaacatattccattcatcctgtgtctccttatatcaacagagatattaaacagtctcatcaagggcatggtgttaaaaaaaaatagggtgaacagtgagattgccgaccgacggcagacaatggcatagaaaaagtaagacatatgtctttgctgaaggagagggtaatgaaagacatgatagcaaagcatttgtaaagacaacgcctgtggatgcaagtccgggtagaccttcccaatcgagaatcatgtctgtcttcgagacagcgagcctgtacactggagaagagggcaaattacataggggatgaacacaatgtgtatacaacattattataacaaagtcgtcagtggggtttaagagggaggtagggcaaaaatgaacagagaagagaagatgtaaagacgttgggcatcatgggtgcagttcgccgccgagttgtaacgccagccccgtttccttgctacggagtcgagggctggagttgcttggaggaaccagggcatcgaagttcaatcgcttcctgctgctggtgagcggagtgcgagcagggttgcctggggtacggctactccaggttggctgcgccgggctcggggtcacattcacgaaatcagcgaaattgaattgctgattgggtgtgctgatgttggcaaacatgccagcgcccagtgtaggtgtcatgcctggcagcagcgcgtgctggctgggaggagtggaaggagggaaggccaggtttccgttgccccttgcaacccgagcaggggtcggagagttggcgaggtacaaaagcaaatccgcaccatcctcgtggttctgaggttggttgttccgggacaatcgcatatgttttgggggaggggttcgtggaggagaggagcctatgacggagctgatgtgttggaaactgtgtacaggcagatcgggatcgatctcttctgacggtctggggtatacaggcgatgacacctccgggattatagcctcagacatgaaggggagttgtgtgcgtcggctcggacggtgtcggttcatgcctggggaggattccggcagccggtgagaactcttccacgagacccggtgtaccttggcaggacgctcggaatcagagtcagaccgtaagcgctttcgactcgcggtcagcatcggctgcatgactcgagagttgaaggtggcagcatgtttgttgcgggcggatcgagggagctctttagagtaggtagaggcttggaggggaggagaggtgaacggggtctcgcagcgactgcgtgagaactcggatgaagagtcggaaggcttgtcagtctcaagaactggtctgccatcgtgctggtgcgggttcaggccatgcaatcgaccgtgttggtacttgagtttggcaaggcccaagcgatcctgcagactgagagaaacctgtgcgaagagaatccagggtcagtcccacatcaccaacgatatcatttggaagcattcagatgcagtggcaagtatttagactagtagccgagactgcatctcaagggatgcggagcctctttttttttcatcgcttacctgggcgatatcgattttgcggatcgttttttctgccgagcccggctgtgagggagacattgtgtaaggaacccaatcgaaataatcaaactaaacaagacacccctatgcaagaaaaaaagaagacgttttgaagagagtgtcgatgttggggtttggggggagtaagggcgaaagggaagggtgagagattggcgaattgcgggaactcggagaccaaatctggagaagcacttgaacagattgggatggaaagatgaaagaaacccatttttattcgctggacggtgttaaacataagacatggggcagaaatgtgtctctttgtttcttattttgaagtctcttgaatctgtctttctagatctactctgaatatgaactattccgtatgtacggggtacggggaagtgtgtactccgtttacaggtagaccacgacctctatatagtccatgcgatcactacccagctgtttattcttgttgattctttgatgtgagagggtgctccccaattgagctccatcacgcactttttatactccatccaatctcagggtcttctcccagaacaagaatgttctttttccgattcggcgatctccatagaaaccagacattcagccacagattgcgatccacttggactggggaatgaggtcgtcactcccctgaggtatgccctagatcgccggatgcaatttatatacttacgtgtacgcaatatccaattcaatcccatgcgaatcgcaccccatagcaagaaagaaaaacgccattggtattgaggctgtgagacggatttagccatgcatgcagccctgttatcaaccccgttaagattctaatcttggaagagatgtgggaggacgattttaacaggagccacctacgtaacgccgtaaatcaagagtctccagatatgcagcataacgtcaggaagcctgtaggaaactaaaaagtacagatggccatggacatgccgtgttcatagcccggtatgtgagcccctcgcacgctccaagctaagaacattagcgatccccgatccacagtgaaacattgacttaaaagggttggagctgagctgataacagccttgggaggcataatgcggtttgggcgcggattgaggtacgtaatgtcgatgtagttaattaatattctggaactagagggggaaatctcagatcggcttttctttctttcatcttctcaaatcaacttcattttgaccatatcaaccagaatccatcccctttccccctatttggtgacttgcggggcgacttgtcgtcaaccgcaaacggttaccctgttcctgacaatttaaccccgtctgaaaaaaataacatcggggcagcttcgtccttctctctcctctcaacctcgccatgccgttcttcaaagacctacggcgtcgatcgaaggccacttttcacaagaccccatctcatagtgtggaggaggtctccgggaaatcgtcatccacaatcgacacttcctcccacaactccatcactccaccgtcatcaatcagaccaaccctttcaacccctagtcttccagcactcaatgagtctgaaaccaccagcacagccagcttggcaccgccgtcacagcgcccggggcctttagcgaccggttcgcagcgaaacagcgttatcgtacgtccaccctcattccccgcgacagctgaccatactgaccctgatcgcttgagaaaacagggtagcagctcgtcctcggtcaatggcacgtaccgatcacaggctccggtctcgccttatgcaccgagagtggtgtctgtggcggataattcatgggtatgtttctctgtccggcacgaattggaggccgatagtgttccggtgacatgaaatcaggtatctaactatcatgcaggtcaaccaaaaagtcctgctcgtctatggtcaaatcaacgacccaaggcaacagccgctcgacggaaacatcaccgtctatcaccaccaagataatttcccgtcgactggctggcccgtcacggcatcgcattttaaagtccttgttcacctagttcccggtcctaatcgccttcgctttgattttgtttcgccaaaattgtccacggggagcattcaccccgccatccactcctcctggctttgcattaactaccttcctctggttaacaaccccccattgcagctagtcgttctcctggggaaagattcagacggcacatacgatgcagtaccggaaagggtagagcgcgaaggaaacgggttggaaatggccattcgaaagtaccgcatggctgcctatctctggcaggccttcactggcgaacagatgttccgcaataatttcggccgacgttgtttccgattcgaggaagagtggcagtctggtagcttgagccgtcgcgactcggcccaaggtcagatgcggaatgaggccaagattcacgtagtccgcactgagaaaacagtcgccgaactccgggatcttaacatcgctcagcagaatgggaaagccgagaagaaagacgagttgttcgccattgctaaagacgcggtgcgaaatcatttccggccccaggccggccagaagcaatacgtctccgttctcctcctcgattctcattgggataccgaatctcagatgatcaccggccatgcagctttaggttcggctgacagcgatatcaaaatggctatatttgggtctcattgtctccaaagctatccatcgtgtctggaagaagtcgtggatgcgttctcagactgcacccgcacggataccaactacgtcgccaatgactgtggtgaggcgggctccaattgggagtcagcaaatctgggcatcggggctcacatgcacgaggtgggccatctcttcggatgtcctcaccaggagtcgggcgtcatgcttcgcgattatgtgcgtttgaaccggacattcctaacccgagagccgttctcaacacgtacaaaggcacaagggttgaaggtgtgtttgcccaacgacgagtgtagctggcaccgcctcgatgccctacgcttccgattccaccccagcttccgactcccaagcgatccttctcccccttcggatgatagcgtccacgtgtggccagtcgagaacggcaagatattgttcactgcctcatcggggatagaattcatggagctatatgccgagggtgacaccctctgccacaacttcatcgagtacttgaacagtgagtcgagccccaacggactaccacgacaagttgccgtgacggagatcgagcttcgtcaacgtgtgtatggcactgagaaggaaaagaaaaagaacatccgtatggttgtctgctctggtgcactgggcagctatacggttgagaacattggcgatctgaaatcgaaaaattctctcgtcaaattgcccaaaggccggtctggttttaaaagcggcaaattaggccagtcggcgatggaaggcagcgaacccgagcagttgttactggaatatgcgttcatcaattcaaagctcttgacatcgatcaaggtctaccatggctttgcgctggatggtatcgagttctgctacgaagatgcgaccagtcagctgtttggcaagcggggaggcaaacctggtggtgatgagttcgtcctggatacccgacgtggggaagttctccttgggttctatgtccgagctggtctctggattgatggaatcgagattctcacgagtctggggagaaaatcgggtatctatggaaaccccgccggtggctcagggtacgtatcccctattacttttctctacatatgaagcatgctaaccaatgtgcaacagccacactttaatccctcccttgggctacaagattgcgggaatctctggttcctgcgcatcatggattgatggattctcattgatcatccagcactgatagcaattgtccaacttttctttcctccgtctctgagaggtcctcatgcctcgaagctagccaaatcccggtgaaccatcgtacagcatggtggactgcgaatgactgcagggcatcctcctcgtccatctcctacaactactaagccttgccttttcttgcatcttttaccctcttttcatccctctgggaacagacaattccgcgttccgcaactggcccttggctactatatacacgaggttccgtcggattttgtttgtgtctatatgttttcttctatttcattttctgtcacacatcggcgtcatcggcgtgttagggtcgcatgtatgcatgctgatattttcttcgacgttagtcccgggtgcatggactacacttattggtaatcatcgagcataccgatggccacacacagcaccactgaatcattttgtaaaggggcatcattcatattggttggatagttcatatagagtaatgtcatgaaaccaccgtcaatgttcgagaatgatccagagtaatcctacactttgtaattaagacgctggtaaatatccacagggtagattccgaattctcacgggcggtcctcatacatctgtccaaacttatctcctgacaacaactcgaaagagacaaaaaaaaaaagaggaacaccggggtcattgaccggaaccctactacacccgcatggaagcatagtactaagtcatgttcacaattacgaactcaaatgacccctcacaatcccaatatctatgattcatgccactgtgggcgaagtctctgtggttaaatccacagccctagaaggatcatacgatctacattcgatgtagcttattatgatcttcggtgcatattcattcctagacagaagcattggccagccaatccggggagggtcgttctccccgttgatccccgttgttgtggagtggaacgagagacggcacaaggaacatatagccatctagccatcagatcaccaatctcccgagagagagacagggactacctaggtatatcggaacctcacgccgattgtcggcgccgggaaacgtttgacacgttcgtgggtatgtaagatatggcggaagggagactagacctttcaacgcaacatgctcaccatatatcatgatatgaatattattgtgtggccccatctgtaaaattggctgtttcatgtcggtatatatattattaaagggatactgaatgaagccctaggccgaaggatgttcgtctatggatagaaagaataatattttgcctagctgagtagttgtgtgaacacccgccgaccccgctataccgcgtgcgaactttgtatctagtttccggagaatataaacgtgccaatcataaggccggaaactcgtcacaaagtagatatccacgttttctaaatacagctccccagccaatcaacgagctttggccctgtgctttggattttttgacacatccccattcagagtgccatatgcacaacgtctatatttacgcgcatcccattcgtgccgacgctgaaccggggtgggaacccccgtgtacatgtacctcccgtcgagaatggggaaatgctcgtggcggaaacgaagctgcgtaagctgtgccgtcattttctttccagagctcggggtgcctgagctcaaggtggccagaccgtttgttggcctgactggctgtttgctagtaaatccactgcaagccagggtagatcggcccctctccccattgccgatccccgatttccgattttcctatatattatgtggctttgggtttttctcttggttgcccttttgcgctaggcgtgtgggttttgcagggggggggggggggggnnnnnnnnnnnnnnnnnnnnnnnnnnnnnnnnnnnnnnnnnnnnnnnnnnnnnnnnnnnnnnnnnnnnnnnnnnnnnnnnnnnnnnnnnnnnnnnnnnnnnnnnnnnnnnnnnnnnnnnnnnnnnnnnnnnnnnnnnnnnnnnnnnnnnnnnnnnnnnnnnnnnnnnnnnnnnnnnnnnnnnnnnnnnnggggggggtccatgggcgggtcggttaggggagcttgatacactgctctgcacatgcacactctccctggacgacctctcaccagaacatcgacagcccgagaatgaatttccctatttagagcagatcacccgcatatacaatactgtattttatacggcgaatttcaataatggcagctccgagcccgagctgccaagcctaccgatccatcccccggaaaactattcttccggctgagagactggtagtcctccgtcgaagctgtttatttttatagaactattagttattggtgagtattagttactcacggtggacccgaagccacaaatgcgggattagggtacagagctttgtacacctttcgcactgtgcggggccaacagctcggcgagactcgtaaaaaactcgggtcagacctgagatgccaacgtgaaatagaggctagagtcctaacgccagaatacgagcgcggtggagatgatcatatgtgctacataagtcaacataagtactaattaggtaactagaatttttatccgtggactcgagtgtctcccgagctagaacccgcgcttggccaaccgctcctacttcctttacagagaagctcgattacttacggagtatctatgtgaaggatgcaatcgctaaagccccatggaatttacagattaaattgcataacgtacggagtactccgaggccagatcagccaataatcgactgtatgctctatccagctattgtttccgattgattccagtgaaatgatgaagacacacaaattcgcactccagacggtattttctgaatttctttttttttctcaactgtggatgtccaacgcagcgtctagcccgtccatttccccccctgttgcatatatcaccaaaaacatccccttatgacggcgtggctttatgctagtcaatctgatcttggggtgatttaagtggataaggcgttcgagtacttacgctgtttgtgttgtcttgaacgctcactagcctcatacgtcagactagtactttactacttttagaaacggatgcacggattccgtgctttagcttcaataacttaaattgagagctcgagtaaggtacagggtacatacgggtaacggtggacgttgttcttaatgcacatggtaaatatacttacagcacgtgctccactgatcattcaagtgcgaatcgagccatattacaggtgggtaggctttccagcaatggcatgtatggactagtattgttttgacgtggtatgtggctgtatgcaaccccacaccagactttacattccataccacctcagtatgtatggatcaaccagctaccttggccatgatgaaccatgttggcatggaaatgggtttaaacttggaatatatagttgacatggtcgctatcgttctggcgcacggtgtgcagagtccctcgtcaacggacccgtgtctatgagccgcgggagaccgatgaaatcatcagcaatatttttttgggattttttgggaagcaccaggagattggattgatagatctccgggcccagtcagttgattccggtggaaaaatgtatatcaaccgaacaatatcagtttgagtgtagatccggtcgggccggccacctatcatagttaaccgctagagattaatagttccacattcctcgttcgcggctgatgtactttgtatgttgtatgctggtatgaggtcaagattcagattggatagatgtggctgtagtgttagatgaatgacggttataagattttaccaaaggaccaaagtacgtatgacctgaatggtatgcataactctattttactgctaccacaacaacatacttatttgccatccaagcaagttacattacctaataagaacgggagatacttctagggttccctccctagagtatccgtggatctgaatcgtcttacaaggacctccatactacgtgttgctaatatatgtatgctgaacacgggggttatatattaggaaggggctatgtctcatatagtactccgtatagacaaccgtatgaatctgaaatatccatgttagaatagaaaggagaacagatgctctgtatataactagtatatatatataataactccatactccgtacgttgaatctacctactccgtacctagtgatatatattgtcatacggagtactcgaaatataatacacacccgtacaatacgtaaatttgcacttcggtctcgctccaatgtcgttttccccactatgtccgcacggctctccggtaactgccaaaggtctccataatgtatttcgctcgaccaatcattttattcgaacaaatatattgtccaatttctttagcagttcgactcttccaggagatttcaaaaaaaaaaagagaagaaaaataaaataaaataaaaaagcctcttaccagaagtggccccctggtcttatcagtttctcccaggtggcgacagctttcctctctctctcctaaaatcttccgagcacatccaatggtttctcctttgtgttaagtccactgtggctcagtggatgacagtttggtgggatctcttatacatctgtcattggagggcctcattgaccgtaccatctttactcttcctttccccatcatcccctcccttagagcattatcccctccttccacccctcgtctctccaataatacatcatttcctccaatctcctataagaaggaaacatagtccattccaaaattggtttggatcggcctacactctatctgccttcacccttttgatctagtcccgcgatcttccgtttctggcgtatttcatttccacacccatctagtcttttcacattcacatcagagaaaattccctagaaccccttgttgcacttcgcacaatctcgaattacctcgaattacctcgaattacctcgaattatccacgacgtacgacctcatccgaacgctttccgaactcgatcaatccacgtcgtgaaaccgaagaccagctgagcacaaccatactggcaggccacaatttacgggtggccataatctgtttcttgccttcactatccaagccaggcgaagcattgataaattaaataatgttcaccaaccggtgagtttgtcgccgcttaacttggtcaatcgtataatggtctgttctaacgttcaagttcgcgcaacaggaacaacacccagaagccggatggtgagttcatcagtcgcttccagcagacattctcagacattgtccctcggcgggacagcacgagtccgcgcaatgtgagggcaggtgaacctttgatggcagggtatgtacattatattctaccaggtaaaatgtccgaggtcagaaactgacattcttgcatagtatgcccgagaacaacgatgtgaaaatggagaatcatgatgtcaagttacccatcaccaacaacgaccgcactccccgaaatatgcacgaactggggctgacgccatcatggatagaatccgcttcatattccatgatgcggcctgccaaccagcatacaagcctttatgcccccacttcgtctgaaatgggtgccatgttccataatcaagcgggcgatttgcataccccaacggggatgcacttgatgaccccgttggcgggcatgccggctgtacacaatcaccacagcactggcttcgagcccttccatccgcagttcatgaattcagtgcatggcatgaacccgtacacacagccatcatatgcgccaagcgcattcatgcaccgcgacaccggatatgatgtcatggatgatactctcgatgactcttctttaaatgatgtacgtgttgaaacagcatccaatgtaaccgcctcgacggaattttcggctcaaatggctggtgatatgtcatatgccaagggcgaaaagtgagtttaatgatccaaatagtaaatgtccgttcaatcctaaccaggttcgcactcatagattccgcttcaatgtttctctacgagcaccgaccgccatggtgaagactctaagtgaaattcccgtgacctatctcaataaaggccaagcctacaatctctcagttgtcgatacaagcccaccaatgctcagccacgaaccggtccgatacagaacattcatccgaatttccttcgaagagcgagaacaacgggcgagaccgtcagcatgttggcaactatggaaggaaggccgtggtaccacagaagcccatcaacggggcgggaaattattggcagttgaatacgtggatccattacaagggggcagtgacgcacacaggaatcgacaggttcaagtcgagagtatgtcagttgacggcttctgcgtcacttggactgccaacccagcgaccggcatatcagattgcaatattcccgtgcggtttaatttcctttccacggatttcagccactcaaagggtgtgaagggaatttctgtcaggctatgcgccaaaaccgagcttttgtccctgggcgagaaggcaggcgtatcgcgcgatacggagctgtcttactgcaaagtaaagcttttccgggatcatggtgctgagcggaagctgtccaatgacgttgcgcatgtcaagaagaacatagataaacttaagcagcaaatttcccaggcagaagtgggtgcgtttacgaagcgcaaacggggaaacaatgcttctgccgcaaagagatccgacaagtcttcgggccacaagcgaacttggtcgatggactcggaaaatacttcagagaaagtttccttggaggacgaccttcaagccaagttgtctacgatgcaagagatgttctcatctactcgctcagtgagcgttttcggtttacgcggtgacaacttcgacgatccggacctatatccgatccacttatcaggtgatagcgattcctctcagtatgggaatacaagtcgttcaagcacacgtgaattagagtctatcatgccttcgccgccgaacaccaatacctcttcttcgaattcgccgcctacccaggcactcagattaggaaaatgccccaccactatccagagggttccttccggcgaccaaatctcaaggggtttcatagaggccatcggtgtagacttgacctaccgacctccgtcggaacaccctctcaagcctagtgagtttctcgcgcgcaacccgtcaatattttcgctaattttcttcgcagttgcatgcttctatgtccggatcgctggaaatgcgaagcgctcggaggacttttaccgtgcagtctatttggcggaacgcacagttcaagaccttgtgaggcaaattaccgagaaatatcacatcgatccgatgcggatctcaaatatcatgcatgcccatgagaagggcctgcgagtcatagtcgatgacgatgtggtccgccagcttccagagggtcaagacatgatcgtcgacatatccgaagcacccggcggtgtttctggcacacccgaatctcctatggagatcaacttaacctattaaaactgcgtcacctacatctcaagcacatgccccggcatctcaaactcgaatatgatgcaaaagtaaaatcttcttttcacatctcacctcgctagccactgtggtctcttcactctggtctgccgcacgaactttccacattgagtgcattcttgcactcatctttgtcgtttcgtgttttcatcttctctaatgggtcggtactttttttcttctgggcgctgaacacggggataataaacgagtctccgagcaacgataccctgttatattatgtttttttgtttttgacatcgttgtgttgaagcttagcgttgcttacccactacgacggtatatgagtcgatgggctatggaactcttgatatatttgtcttttatggttatcatttcgatctggtcgagggccgagcatacgacgttgataccctgtttacctcttttatttccaggtcttctcgtttgatattagccatttttttctttttcttttttcttttctttttgttggttgctggtctgtaccggtcttgagcgttttgactttttctgtgatgtctatctctacccatgtcttatgtcttatgcatatatcattcgatatagatagtctcctgagggactactgaggatgggactgcaagtcagccactcggatgcaagtgctagaatacgatgaccttgctacctcaatttgatcttccatgtaggagtcgtactttgtcctaccttgaacactaggtgtctgagttgttaaactctttaacaactacaccagcaaagctgcagcagccactcaacccctggtaccttggaagactacaaccacatttggtgaccagcactcggtactgaaagttgccaccttaaccgagaatgagaaatatctaacgcttacatagccaccaccttccccccttccaaagtgggccatgcaatcaaaaaagaaacagactaacgcctcacggcccacaagtgattccacaccaacccagtggaacacgcactgtggctttcccattccaagccataaaaaggtaaacaaaatactacccccttccccggttcccaggaacctgggaactatcccacggctggtgaggtcatacctagttttggcagggaagatcgcctggaccgctgtttcgggtcgacataacatcactgattggatgggtcatctcccgtccggttcctgtcagccaaccaatagcccaggtggcggacggggccgggagtcgtccctgggaattgtaatttcggtacaacatagtaactccaaatcgggagttgcatcgaaatttccagatcgagaatacacaccccacgcttggatcgtatggtacgtatgtttgtcgtgctttgaccttttcatgagtagcactagttaggaaatcggaagcggaactggagcaaaaagacgtcacgtacaactctaattgtgtcaagcttatctaatcttaagcgcgaagtctaactatgtaattaatgctgaagcattcctttcaagactagctttgagaggctatatttcattgccctttgcggttgacgtcttctgataacacggttactttcactctgtgttgaggacccgcaaacacggttgtattatccgtggctcctatctctttcccaaatactaccttgaaataagcgagattgatttcccactatcactgacgctgtacggggtacggggtacaagtgtgcatgagagtctgagcgcctgccgtcataatagtctgagcgcttgcaatgctgtggatagctgcagatgctgaatatcacttcctaaagtagagaggtaatcggcgttttgtctgtaatgattggcctgcgcaacaacgatatagttgcgatggaggcttatgatgtagtgaggggtgaattaactttggtggcaacagagtggaggtggtctacggtgtagtacatccggtagccgaattaggccgtatatcaaattaaccttggaaccattattatttattacgtatgtaaattacagacccgccaaccagaccctggcacttttacttcaactaccgtttactattttggaccctcttatgatttcctattttaaccacacgctcacctatatagctgcagggcttgatgggcttcatttgttgttgaggtgcaaatggtaggttatttaggaatgaagagtgcttctgtttagagtatcatgctagcctgtcacttgctgccacttagattccaggacgatggatggacggataagaagcctgacaggattaggaacttccccccagtggaagatgtggtatcaatgcgcttctgtaaggcctcggaatacgcttgcatagcttagacttccagtctcactgacggagttgacttcagcaaaccatctttgcggatatgacagcgttattgaacgtacgtagatgcatctcataggtgatcatattgcctaaacaacattgggcactctagttatattgctgctttcttcggagaatgatacagcgagaagaacttgtctttgcttctccgtgcaataagtagattccaccgtgcactggagtcatcgctgtttgatatgtcttcccttgtagcaaagaaatgttccaaaaatacatagtatcctcagacaatgcatttaaagagctagcctgagcagatatttcatgattgaattaatcagtagttcaatacccaggcgacacacctccattgagcatcatctgggcgcagtcctggtgctcaagtccatccaccgggtaagagtgaggcttgcatgattttcatccagggttcgtatctccaacttccaagagattacatttatcacaactcccttggtcggcttgtttcggtatgcttgtgctagagcaataacactcaatttgagaggtgaagatgtcgataaagcccaggtcactaatcatgggcccattttcgcggtacgtgttactacggctctttcatgcgttcacaagcacaggcccggagacatggagcaaattcgagcttcagcagaatattgtcatcataacatctttcgggggatctttttctgatgttttgttgacgagggattgtaaccagggcggggctcaggatcagattcgaccagctcctatctccgtatagagcaatgactgaacggggattccgaaaccggtccttagtaaaaccctctcatcacaagctgaagattgaacgaaatggaaaggtagaggtctttgaaggtaccgatatttcagattagtagagtgacttggtagcttagtgcttttccacaaataaagtcggaggcagatgaagcagagatggtattgcggtaggtcgtaagaaagccgaaatagcagcttgatatctgcgtcatttccggtgcggccgttcgagaagttccaaaaatcaatcctagcaaaaggaatacagcagatgatgattgcctaatatcagacaagcaaggtcgactggtgataagtgctcagagatcatctataatagctagaaggtcggtcaaggctggtggctttcgcgtggccatcctgttgcgaaaggtatcccctgtgcccctggctgacttttgcttcacttgttatctgacgtgtcagactgaacggcttagtcgtaggcagcttccatggcctttgaagtatcatccgaatttcttgaccttgtaatccggatagttagttaactaattcccaagcgagctgcgcagcgcagaacacatagtaaaatcggtaaattataatgtggtattttaacaaccaacgcttttgtttaatttcattactgtccgatagcaattgataagcattgggctagaaggaaaagctcatatagataaccgttgttgagatatcatgttgtaatctatcgcttttactatgtgttctgcgctgcgcagctcgcttgggtgcgcagctcgcttgggaattacgttagttacattgggtgattgcttactaactggaagtacgatccatttgagtaatcacacctcggacctcgggagcaggaccctaagcggcggcaccccgatcgggaaactgacatccgtggtcaattgctatagatatccaaaattcatggctatagatttcacaattctagcattttaaactacttctacttggactcttgaggcacactttgatacacagcacaagccatatgatgtcataatgcgtcagttcctcagaagtggggctgaaataaattatttccactttcaatttttgtctgcgcgggtcgtcccgctacgtgaccgcgtcgggtctagggtggttctggttacataccgcacatttcccgggtattttgaaatacgtaacgtctgtatctgtttacactagtattttttagaatacaattatacaacgttggagtttgccactctgctctgactgatgggatatctcccggctgggactctgattggaacctatgcttatactagcgggtagtagcgggtgtttaacagtatagacgttgcacttaatctgaatgtcatctttctcatagtcaaccttgacattatatgtgataatcatgccctatgtcgtgtcaccattgcccctgacttgatctgccctgacaatatagcatcgatcgtccttggcactggtatagggctgttctcggtcaaaatagaaccccattgtagatttacgaataatcgacaactttcgaggctcaagtgatatcccacttcggtacttgaccttctcgcagtgtctgacctaaatctaggttgtcatgccaatgataatcgttacttcaaagatattaaaagccaatatccctgcaatgttttactacattgtcctctatttaaacttaattcgggatctctatggccataataaccacaataaaaagcagagctatacctgtttacctttgcagttctgttaaggtggcacatcgaccattgtctgtgaaacaccaacctcttgatagaaatagttctgttcttccgagagtagtagagggctggttttgagttgatccccggatatcaggtcttttactacagtctacggcatgaccctgctgaatgaaaccccccgatgttaagtaaacggcctttgtttgcatccaatttagtatatgaactaaattcagactgtctcacttaggttgtacaccgatggttgccggtacacctagtttaaggttctattcgagtcacacatggaggtgtagtgtccaaattatatcccaggagtggtgccttccagggttgtcaagtagctcactatagccgtaaacggcagtcgtgacttccttgtatgtttgccctaaatatggacagcacgtgttccccccgttccttcctgaacagctggggactttgtttactatttcttcctccagtttcctctttcttttctcctctgttctctcctcttccactttacgttcgttccccttgttcctcaattgaccctcgattgcttggttgttccatcaagtgatcacttcacattcgtttatcaacctccatattcgccaagatggtagcttggatgcgtttcaagttgcttctggctatggtcaccgctctggtgactatggctgctgcttcggctggtaattatcatggctgataattactctatgatcacttactgaccttgttgcaacagaatgccaatacatcgagacggtctttcttcaggacccccacactggggagcagtatcagtttggtgaaggcaagtcaaacctgctatctgggcttgcctagaaatatgccgttactgatcgattttcacagtcaacgttctgcctcgggccttgtttggtcgtgctattcaagcttctgaactgagtaaatccaggctcttgccatcctcgcctcttttctagaccaaaaactaacttggtactagtcactgtcacggttacccataccacctgcgatcctgatgaatcgaccacaactgtcaccacagatgttccttgtacgactgtccagtctaccacacttctcaccacggagattactccagtccccgctcaaagtacccctgctcctggtgttcctcagtctactgtgcctaccacctcgtcaactccggtgcctgttaacactcagacttccgtgcctattgtccctagcgctacaagggtgaccaccaagtcttctgcacctggcaccactttggtgacctcgcagtcttcattacccgggaccgctcagaccccagtgcccagtactaccaaggtgcccattggaagcagccctgtaacaaaccctggatcctccacggttactgccactaccactgagtcggtttcttcttccagtcctaatgctaccagcttggctcctatccctgtcactaccgagatccctggaactactgggtccattacatccactcgtcctaccaatgtggttcctatccctggtactactggaattgcttacacaaactcaactgttcctcaggctcccaggacggtgactgatgtgaccaccttttacactacgtcttcttgcctcaactcaactgagctggcccctgctccggtgaccactgaaatcaccattaccgttgaagttccttgcaccgagaccaccaagtgtgtcagcaccaaggtccttaccaccggcaccctgccggccttgaacacaaccgttcctgcttccatcccacggaccactacgaccaccgagattcagtcgaccatttctgtccctgtcccgattaccactgaggaggtcactggcacggtcgagatcccttgtaccgggaccaccaaatgcaccagtactaaggtgtacaccaccatccctacggagactaccactatctctgtgactccagtcccgattacagctccacagcccaccactgaggtggtgactatggtccagccgactgttcctggtgcccctgcaaaggagaccaccgaggttgtgactactgtgattcagcccactgctcctgctcccgtttcgcagggcaccaccgagcttgtgaccactgtgaaccagccctctgttcctgctcctgttccccagacttctactcacgaggtgactaccgagatcaagccgactgacttggtcccacttccgcacgccaccactgtcgaggctacttctctggtcaaggttcctgctccttctacgcagccggctaccacccaagagaccaccgaaaatcaaccagtcgctgcggccccgaccactctagctacttctactgtctctaagcctgaggttgagagtaccacaaccgagtccaagatttcggttgtgtctccccaacagcctactcacacccaggaggatactgtcctcccatctcctcatggcacttcttccagtggtactcactccgcttcccctgttttcaacggtgccaatgccgctgcaatcatggacagccgtgtctttgccatgagcattgtgattatgctctctcacatctttcgcttgattctgtgagaacgacatacactcttaccgtgtgacgaggcaagtccagccatcttctgatgtagcaaggatagtatctgatgcgatgactgtgttcgtgatggaatttgaggaacccatggtgttgatgggtggtcgtgtgtttttatgggatgcaactggctccccttaatcttgcaaattttatcagtcactcatattctagttgaagcatagctttcctaatctcacaaatgttcaccatggttgtgtctaatgataaagaaagtatcctgtagtctgtaatctgcaaccgaatggcaactccaagggacaacatagctgaccgaacagtattcgggcagttatatttcggctgtgaaataatcacaatgtacagaacgtaatacgtatgctgtgagcatcaaagcattgaacataacacatctttatcaataaacaacggccagtgtgataacctcacagaatggatgaatgcctaatatccccaaatggggatagtagcttggctaaagccagggtatctcagagaaacaaggagaatgcataggtatgtgcacatggagtatacacacaggacagacgtgaatgggtacagatgtccctaccccagtagagttcaaacctcaacctcaccaccaagagattcaatgtctcgcgtcagagcacaaatccgacatccatcgccaatcttgtcccgcaggattcttgccgtcgtgaccttggggccaacactgcgagatgcagtggcagaccgggtctcgtcgactggagacatggcccggggtgtaagatcagcagatcggtcacggctgtttgcgccggattgttgtggcgtgtctgagtgcaagtgggatagatggaaaatgtggccacaagcaaagccaacgagaatttctcgctctgtatgggggttcttatcagcattgtctttttggatgaaaggagttggggtcaaaatcataccgttttcccggaaggcggctttgcagcnnnnnnnnnnnnnnnnnnnnnnnnnnnnnnnnnnnnnnnnnnnnnnnnnnnnnnnnnnnnnnnnnnnnnnnnnnnnnnnnnnnnnnnnnnnnnnnnnnnnnnnnnnnnnnnnnnnnnnnnnnnnnnnnnnnnnnnnnnnnnnnnnnnnnnnnnnnnnnnnnnnnnnnnccgggagggggtttttgcgcccgccacatcttccctgtccagggcctccgaattttctcgcaccattggtttcagatatatgatcttgagctggggcattcattgtcgttgccttcttggaatcttcctcgccaacctcggtgacatcaaacttgattccccgccgctgacctttgcgcagcgagtccatcccaagtgcaacttcgctttgcataaccctagccgcgccttgactgatactagcctgcagatcatgctcacggatcaagcgggtgaggccctctcttagaccttcaatctctagcccgctcgggatacgacgcacaagctttatcgggtcgatggccgtcccggcctcaacgagaagaccatggatgaactttggcttgtccatggagtagtcaagcagatcctcccacagatcaggatcgtcctgtgattttgcaaatgaaatggcctgtgaaacatccttgagatccgatagaatcaggttcaaggctcgctttgtctggcccatcttggacaagagaaaaatcaactctggcgtgaatctgtggttttcgcagatcgatgtggctttctcgaacgaataggatatgcttgtttggaggaactccatcagtagaggtcggtcgtagtcggcaaatacctcaacagccgtatcagcaaagttatcaatcagggctttgccttcatcagcagcaagcttgctggctgcatcccgagcatgcgttccacgtcctcttctgggtttatgagcgtcctgcggtaatgattcacctcgccagagcgcacggagatagaaataaaggaacaggaaccggtccgcggcgaccaactgtgataccacggtatctggaggaacaatgcccgtgtatgcttcccttacgaggagtcgcgtgggctcagaagtcagctcctccagttcgaattttgtggcggacttcatttgctctttggaaacgcgaatcatgatgaaggccggtatatcatcagagactgcgtcgagcaatcggtgttcccgaaccaaagacatcgcagcatctccatcttgcaatcgaatgtagcaacgcaaggcttcgcggtaatgccctcctgctaggaacaacttggcgaggcaatctgtgaggattcgccattcctcagaaccggcgcgtaccgatccggatttcagctgtgcttcgatggattccgtgatcacattcgcatcaaacaaatcggatggccatgttccgaccagttctttgaatttgaccaaatctcgtgacacgtagtgagtgagaatgacttcgtagatctgacaagacaacgatggatgtaaatcgactggaatttttggagttatctcatcaattttatcctttttgataaagacccacgcccagtgttcccattgtgaggcattgcgaatgactttgccacaaatactcgcagcatgaatccacttctcttcgctgacaagttggttgatccagagttccccaaggcgagctttttcttgttcggcagccgaaacttttcttctaccagcggtcgtcatggatgatcgatcatcagcgaagaagtcacctaaactagtttgcgaccttgcagcctcggacataacgtcggctaagtcaggtattgagcctgcagcttcgggatgttcatcgacgagacgccatgcgtcctcgtactggccatgagaatcaagccaggacaaacggtccgcaagatcccgttttactgcaacaacacagtcatatgggctgtggacaaagattttggcaccaggagcacctgaaacttcctgtacctccttcggaaggggctcctcagtcgcgtagattttggacatgaaagagggagcaaatctaccagatcccttgtccccactacttgtggtactgcggatactggcgccggagctgaaaagccgcgcagagtacatagtagcatccaaaatcccatgcccaagagccccgagggcaccgcgctggacgacctgtccctctggggtcttccacggaggcaagacacttagatgataatcagatgccgagagaccctcaaagcggtttactgaaagcgtatcagcgctaatttcttccttggtctcaatgtcaatgacacgaagttcaggttccaggcccttttttcgattgcgggtcccactgcctcctccattacttgcagtttcgccttcggtctccaaatatgcaagaatgacaagaagacgaggcgtatacaatgagatgccagataccacgcagtctgttcgtaatctgtgttcaaagttagcgatgaacgatacaatctgtgagagttccagctcacattgtaacaacctctgcagagcccaatttctctcccttggatgttttgcttgccctttcggggtagacatcaatgacccaaacagttcctccccacccgacgacaagcttttccactttctcagtgggcaccgtcgactgtacctctggacttgctggacagtcatttggatcgagatggtcccgaatgtccagagcggactggtcgatccattcagcacgtgccttccaaacattggccatttcgtcccagccgggacgatttggacgatcaatatggctgattcgtttccaggcaaattctgtctctgaagaatctagatgtaaatttgaccgcataatcttaatgccttcctcgttgacccaggccacgtaatttcctgacaatgaccatttaattgtgcttatagtcccttcgccgctgtggataatcgtgtcttttccactagtggctgctaggcccatggatccaagccaacttgacgccgttgcggctgcaccccccattgttgtagaattggaggtcgccccaatacgaccaccagttgtcaagaccaattcacctgctcggccaccagacaggaatgcccggtcattcttgtattcgggagacaaagcaatagactggactgggcggccaaaattacgcaatagcacatccttcgggtctactagcgatgagacgcacacgtggccatcgattgaggaggtcccgatgtaaatcgagttcgatggtagagggaggacggtcgaatgattacccagttttccttggccacggatactgccagtgaatgttgatgctcgcgttggtggtctgtattcttctgcagtctgcttgctgaagagctcttgcttgaagttcggaaggggaggcggacatggcgatatcgatattgaggtgacactggctgagtgtgcatgatatacacggacggattgtagaagcggtaaggacataacatgcttgacaaggtcagctcatatgtctgcgcgctggtgtggctaacttacgacgtttccgttgtgcgtcccgacgatctaggtacctcgttagctcattatagtataggtcccgctaaggatgcataccattttatcccctgctacgaggaacgagcttgtcgcatccccgttgcgatatactgatcccaggtgcttcgtaaggtatgcgtacttgaggcggggttcctcgtcctcgtcgtccgagtcatcctctccttcggcctcttcttcctcggcctcctcttcttctccatcatcgctgctgctagagctgtggtcattgaatcgttgctgtctatcttgggcgccttgagtcgtgtctgtaggtgatccggttcgtatggatgtgtcgtgcttgggagtgctctgaatggcactttcgtccggcggtgtcgcgccaggcgcgtccatggcaaatccctctcacacctgcagctcccaagctggttgaagtggaatgcgacaagctgaaacgggatcctgtggttctacagttgagccggggtaggtcagtgccccgagcttgattccatgactaagcgggctattgggccgcgggcttcaggacgatgtcatcgaccgagctattcgggctttttgatcctcggatacacacacacatacaatgtttgccaggccatatgtatgtttaaactgttgcaggcgcccaatttcacagtttcctacgcgaccgcagacccaattccttcatgcctctcctagactagcacttccccgacggaaggatttcttttcatccaatgcccacttgaaacaaaaacagaacgccgatgaaccaattgaatcctctccggattcccggaagcaacttcgacggggtcctaggtcaccagcagctcccacttcattgcggcgggtagcggtagaggcacagaggtcgaaggatggcattatctccaaggcgctcctcaaagagcaggggttatatcggactaaggtaggcatgactgtttcttctacgatcttcttccactaattatttatcgctagacagttaccgcctacgccgtcgccgaacaatttgacatccgcaaagtaagagatatcttgcaagaacgaggatatgaaccggacccgttggaaaccgggcttttcccgcaggtcgttcatgttcagatacccttagactccatacagcgcatgacgaatccctccggcatagatctaccatccgacgaagtgggcgatttattcgtgtttccctccggtactgtggtagcgtgggggctcccagaaggattcacatcattcctggcaacgcggactctcttgcccgcagcacaaggtgcccatgtggataacctggaaaccgaggatctcgaattcgtggaggacccgaagcgagagaacagtgtgatcaaaggtgacacgattatactaggcaccaaaccaggtcacggagatgcggagggattaccagcggcgcaacaatccattaacacggtgttgaccaagattgcattttcgtcaggtctcgctcggagtacgaagttggccgtcctcgagagccttctttcaaactattttgaatcgactcggccaattccgactcttctatcaaagggatcccgtcttccttttacacgagactttgtcctccggaagacggggcagctgctcagtgtccgagcccagctcaatctctattccgagctcactgattcccttcccgatctcttttgggacagccgacacgagctcggcttggagggatactacgagcaggctggcagagctttagatgttggaattcgcatcaaactgctgaacgagaagatggactatgcgcaagagatcgcaagtgtacttcgggagcgcctaagtgagacacacggtctgcggctcgaatggattattattctgctcattaccgttgaggttggctttgaagtattacgactgtggaaagaaagagcacataaacaggaggaggcgcgcaagcaggaggcctaggtcacccgaggccagaattgacaggcgcgaactcagtgtgattatattgcccgcgataccccttcattttcaatattagacgagtgcaacataagagaaaatgctgctgtcggcaagtaatcaaagccaggtgactcgtgggccgattccccttatcagcccggctgtccccgcgcttagtcatatgagactccgcacgaggacagtacccgtagacgccgacaaccattgtagcctccttaacatacctatccctcgtctaaatacgattttcctagtacacacctacttgtctattcttatattcttcctctgtttcaattcgacacgtttgttccctgaaataacggcaaaatgataccagcgatgatgcggggatcatcacaacagctcatggggattcccggaccccagaagattctcaagaccgtcggctcactctggctttcgcaaactacaaatgagaatgataatctcagaacttcatcatcatgccctctctcggaaattagttgccaggccaatttccacggtcaagacacctgctgtttcaattaccccggtggtcaaatgctgcagacgcaattctgggatgtcgatcctccactcggtcctgaagacgcatggactatccatggactatggtgagtctatatcatatccccaggttgaatgatatcaagctaactcttcaggcccgatcactgcaacggcggctttgaccaattctgcgactccaaacgcaagtacagcaacatttctctgattatagtggacgcgggccggggagacttgcttgaatacatgagcgagtattggaaggatttccggggggatgataacaatctgtggcaacatgagtggaacaagcacggcacttgcgtcagcaccctggaaccagattgctacgaggactatctgcctcaacaggatgtcgtggactacttcgacaagactgttgaggtttataaggagttgccttcctatgaggttagtttaatcctgtcggttaatgaccgactatattcggatcaaaccactaaccatgcgtaagttcctggccaatgctggcatcataccatctcaaacacagacctatgctcttgccgatattgaagctgcactagaacaagcccatggagacccggtcactatccgttgccgaaatggtgccatcaatgagatttggtactatttcaatattgcaggaagtctccaatcaggggaattcatccctgctggaccaggtcggtcaaacttcaaactcgcgttggtaaatcgcaagcttacaaaatagtcagatggccagaagtccaattgcccttccaggggaatcaagtacccactgaagcatgctcggccggagccgacccggacgacgaccataggtaatccagagcccacggcgccaggaactccatttgcaggccgaggtaacttgattgttgagaggcttaaccgaaagcatggctgtatcattagcttcggaacttggttttcttcagggacctgtgcgactttccgggccgaaaagctatcaggttcgtgaccgtgctttccacacatgacgcctctgctattgtttgctaacgtgaagtatccttcaggtgatttatttactctgaattctagcaaggggccctgtgccttcgagcgagacgcccttacttgcggaccacacgtcaacaagcccagtgagttcaccgtatgttcatcccagaaaatgctccaatatatcatctcatcttctcacactgcatacaggccaaggatggtaaactcgcctacagtgatcacactactttctatgcccaaaatcctcccaaggggcgtacacaaagtaatgtgtatgcttcgcaagggggacgacccattgaaattgagattacctgggtctcgaagtagatgggttatctttactgttgtttcactcgctaccctggtgaaacataggtcggcctttcggtgtgatgttgcacagaaatccctgcatagaatggaacgaggggactgttagacgattcctcaacgcagaataattagaaatatcaaatagaaagcgcggtgtttggagtagtatgttaatatatgtcattccttgcgtgaacggatattttgtattccgaaacttgagggtgcaatcggttgattgagggaaggtcgctaagatgcagactatttgtacttttctcttggaatctattatattccagtcttcttttcacctacaattctacgatcaaggctgtgacgggttatgtggagccagatgtaagctgtaggcatagcatgtttgagatggtagagtacaagccatccgcaattatgtctgtcatcgaaggaaaacagtccttgaacaagccatccttgacagggtaggtacagaagagattcattgaaaataaagacatcaaatacatatcgcatcatgaagtgagtgaacatatgaaaagaaggataaacacctggaataaacacgctgccgtgtatcgaacatcttcgaagagatgagataaggccgaaagaacgtgaataaaaacaatcatgacaagacaaaaagaaaaaaaaaaaaaaaacagcaacaagaagagacaaatacatggggggaaataaggggcaaaaagcaaatagcccgaaacactcgcaagtccgcaaagtcgtttcaagtcccgaaatgtgtgcagagaaagaaaacgcccttttttatcgtgggtcattaaagtgtacaaggtcgtcccggatcgtcgcaaagcagtgtcgccgtgaagaagatggtaagccacgccgtatgtgtcgtcgctctttttgtagtaacatagccgctcaagggtccactaggaactcgctggacaagcagtcgattgggtccgtcaggtcatcaataccagagaaggtcttctcgggataatatgacgagacaggggcgaagtcggttgcatcgacgaattgataagtcgggaaaccagggatgcccgagtgagcgagatgaccgaactcctgtcgcaagtcctcggagggatcttgggtcatgaagatatcgatctccgagctgacggatgattcggccagagtgggcgccgaccgaggggaagacatctcccgaggcgagagggcagattcactatagagagattcctgcgagtacgtggattcctgcgagtatgtctgcgagctgaaattcgatgcgtactgagccattgcctgttcgtatctagcgtgggcgagttgaggtggtgacaagggcagcatgtcatcctcgagccgggcattcacggggttgtaggtgtggcatggcggggacattgtgtggtatctgtctccgggagaggtgggcggcgtataggatgagacggcactggatggggcatagttgggcgagttgaacacgggagcatcttgcagagtggcatgggtctgggctgaaccgtttgaggtggatttttcagcaacacgttgacgagtacgagtggacttggcctggcgagtatcgagatccggacggctgttcttcttcttcggggggcgaccgcgcttggtggtctttggaactacaccggtgaagcctccaacacacatatcgcgctggcggtgccgagttagggcatcctgtcgagcaaagctggcgccacaggcacaggcgaagggcttattgccactgtgtgtcttgagatggcgcttgagatcgtgtccgcgcacaaagtgcttttcgcaaatgtcgcatttgaattgacggtctccgaggtgtgtttggacgtgggacttgatgttttccttgcgaccaaagcggcaaaggcagcctgtaaatagacagacccactttccatctttggggtcggggccggagatgaacttggcaatctcgtcagtcgaaacgccggtttcctggactgaggccttgactcgggcgtcaaggtcatcatcgtgagcggctagctcgatgggagacgacacagtagacggggcacgttttttggttctgccagtggaagatgtgattgagatattggaattttgaggcgtcattccatatgaactcggggatggcatatcggcaatttcggcgaacgtgctaatcggggaattgaccggagagggcatttgctgcttaatctgcacagaattgacataggctccttgaaaagactgcgctctctgcatctcagcagtagcggggttatgggggaatgagaaactttgggacttggaaggtgttgggacattgctgtacatggaataatcaatagatcttttcaatggggtagaatcgggggtcaagggggagtctggcatataatcagtttcggtcgggtcaaattcaacataaagattcatacaagcagtagacatttgcgaaagaattttcgcagatggagcctttggttgaacagagactgggtgcattggtccggcataggccgtcacctgctcgttttggatgattggcatgttgcgccgagagtacaattcccaatcggcattgccgacatattgttgctgttgttggttcgagaattgctcttgttgcatacggtgcagcgcacgcttcaatggtgtattttcggagctctcactggctgatcgggacaaggccggagcaccgatggacgagggcgcagggctgccagtggtggtgtggatcgcttgcaattgttcttggttgaaagcctggcagtcagacccgagcgactgttgttgatattgatatggctgctgcatgtgcatgccatgtgggatgaaagcctgctcgggctgctgggcataggattgatactgctgtacatccctcggttgatatgagaaacctgatttttcgttaaaataatctcgcaactgcgagaccgtcttcggcatgtgtcggtcgacattgggctgttgactgaaggagttgtagtccacagtctggcctcgacgatgtgaccgatggggttgcatattggtcatgactggttggtatggagcaactggggtggagatttgacggcggtgacgaccggttcccagcgcgttggagttcatgattatattgccgcttgacggttgggtcctgattgaggtgtcagtatgtgaatatgaacgcaatgggcactaggaagagggaaagtgggaggggtgttagaggctcaagagtatcaagtgtagagtcaacctattcaggtcacacggttcaagtagatattctcaattgaacctggaagagcagaaacacgaatgtatgaaggtttccaaggtttggttctggaaccccgatctatgtgagagacccgcggttctcatcaacaaattggggcgttggcatggcaacggcggtgtccgggcgtctgggaaaccaaaggctttgacgaaagtgggccaacccttgcccgacttcgattttcccgtggtgatcgaggaccttgcttgtgattattcgacttcttctgcaagggcagctagtccctgtgatagaatgcgtataaacgtacctagaatccgtaagattgacacctcctcggttcgtttccaaggagattcgatataaacaaggtgatctcgtactatatagaccttggctccatatatagtacccatagcccgatgggccgatatggtgccatggcgtcatccatggaaatgatattcgacctgtccaacacgggataattattaacgtagcgggcctcaggcagaaataatattcgagtcacgtgctttttctcggtcagcatttcatttcacgctagactactttcggtgcacgacccaccccacgtgatcgcacaacgattttaatcaccaaccggcttccgcgcacaacgatcttctttaatcttgcaaggttgaggaagacaccactgtcgaggtgagtatttggttttaggccagcggatacgaatgtgatgaccatgcgccattagcatgtagtccattctctctctgacttctacattttcgtcgtcgcgagcatcgcactgactttttttttttcgcaggccttcatcaagatgcagatcttcgtcaagaccctcacgggtaagactatcacccttgaggtggagtcatccgacaccattgacaatgtcaagtccaagatccagggtaagcatcgaaatccgcgcgcaacgatcgcacacaccacaacccgaggctctagactaaccccgcaccagacaaggagggtattccccctgaccaacaacgtttgatcttcgctggtaagcagctcgaggacggccgcactctttcggattacaacatccagaaggagtcgacccttcacctcgtgctccgcctgcgtggtggtggtaagaagcgcaagaagaaggtctacaccacccccaagaagatcaagcacaagcacaagaagaccaagctcgccatcctcaagtactacaaggttgacggtgatggaaagattgagcgtcttcgccgcgagtgccccgctcccgaggtatgtgatagctctgtcgcaaaacgattacccttatattctgattcggaaactaatttgtcctttcttatagtgtggtgccggtgtcttcatggccgctatgcacaaccgccagtactgtggtaagtgccacctcacctacgtcttcgacgaggccaaataaacggtctaagtcggaccgtggtgtgctgtcaccgagcttgggcgtggtttctgctaggctagggcaagtgacggagtgtcgcggttgacgctggttgatgatggttcttggaataccaatgtgctacagtcaattacaaacaaaaactaggcatccgccgaaaacttaaaaattccacgtaatgataagacttgtatgtattcgtagacttgggatattgtcatatcctgtccgatcaaccactatactgcgaacaacaatgcttaaatccgtgtaagccctcactcaacctactcttccgggaacccagcttggacattggcatacttgctctcggggaaatcaagagcattacacgactgatccaaagcgcctggaccacccacaccgtcaacaaagataccgatcaaacttccttgcgccggatcagcctccttcccacccttatcaccgctactctcccaccacataccaccacccagtccgcgctcgcgaatatagttcgccttgatctgcgccatatagggtgtgtcgtaagtaaccatcttgcgcgcaccggcatcatagcagaacgaggcaccaggttcctgatcaaactgctcctgagccccgggtctgggcagtgccttgtaatcccacaccccgttctcccagctgccctctccgacgccggagaagggggcgccgggtccgtcagtgttctcaaatgcacgtccgtacagcggcatgcccatgacgatgtttgagggtggtacgccgccgacgttgatgtagtagtctagggcagtgttgatggagaacggcgtggatgcagggttggaaactgaaggaacgatgttcgcttggtggccagcgttgctgtcccagcttccggcgaagtcgtatgccatgaggttgtagaagtctagcactggggtcatgtcttggaatctgagcttctcgtaattgctcgggcctgtagtagttagtttgatggttcagggcgcttttctatcgccgaggatatggtatagacataccggcagggcaggcgattgacaagtagaaacggcgatcgggaccggcctctctatcaagaacctatttccggtcagttgggccaatttctaagaaccagaataacgatatacctctcggcacttccgaagcagaagaactaggtgctcagcctcggtatcatctagatataaaataagcctcgtgcctccttcgagtatgttccgacaaacccacctttaggatattcccaatcaatatcaagacctaagaaacagtcaaaaccagcatttcacaccatactagtcgatgaaacataccatcgaatcccagatccagaaccaagcgtgtcgccgattcggcaaatgcagtccgaccctcatgggaactcgcaggctgcgcgaaattcgaggagtacgtccagcccccgatagaaagcaaaaccttcagcttgcggttctgcttcttgagcaggaaaagctgcttaacacatccgtacacattagtaccgacgtcattccacgagtctgtcgggtaatgcttctcgacgtcggaccaagagtcggtcaagtacctgcaattctgggtcagaaaatcttctgcagtctgtacggatcaaaatcaggacttacacttcgccactttcgggacggatgttggcaaatgcgtagaggatgtgtgtcagcttctccgcgggtagatcctgcgggttgtagttgcggccgtaaattgcctatgcagtatgtcaacattggagttcttttctgggttgtatatgcagccagttaggcatagtaaaatagatgcagaccatgcagtcggagttgaaatggtgaggccaagttaagtatagtacatacccagttgacaaaataggcgactgatctcatttcacacatggctgatgcgggatgggtagtacggggattaaagtattgcacgagaacagccacaagtagggcagtaaacagagcaatagacttgagatggtacgccacactttcaagtcaaaagaaagttaagagagtttcgggagcactaaaagcaagtatttcaagatacttcagttatgtcgcagcctaattgttagtggacttgtcgtatccttaaatctgggcagtgtcaacgccacaccctcattggtcaggactcactgggcacctgtggcggtgtatatattcaggcaccaaggcgacaaacgtggctgggtatagaagagataagaagatcgaagatcagtgagtatctgtatatctgtataagctggggaggacctatgtcggaggttatatacatatgtataggtactaaatgctcagaagggtccaagaaacgtggtgtgtgacacctccgcctgttcatcgtgcaatgtaaccatacttggccaatcctaatatgtctcatgtaatagtgtgttagcttattagatttggacctgcaactcattgtttagaagcacgaggtaggaagtatgaagtactcgtgatgttaagaatgcaactctccactctccagaatgcgacatggccatcagaaaagaagcaatactatgtagaatcaccattgactagtcatgaggactcgtttactagattcgtggttaagaagatcctgaatattctgaagttcgaagatctcctgattggaagtatctgtataaaaccctggtcaggcgacttacctcgaatatgcccacagcatcggattctttcggcagcagatcaactaacccttagtgagaggcttcccaagccgaggaatgtcggacaagcggcaatcccggatagtgatctcgacaggagatgtacaatgatcgactgaaactacacgtggagtcagccttgaacccacctgtctacatgtgatgaatgtatgtacaatacatatgttgcaagttaaaactgcatgaaacgcaagttctatatccacaaatataatattagatataactagcactcggaggcaccgaagttgatgtgcaacgatcgacaaagcatcttcatccaaccccaccgggcctgggagccataattgaatgccgatcaagacaaacaagagccgaagatacgaggctgtcccgggaagcgggggggggggacatctagaaagagaaatgtgattggcccgcccatnnnnnnnnnnnnnnnnnnnnnnnnnnnnnnnnnnnnnnnnnnnnnnnnnnnnnnnnnnnnnnnnnnnnnnnnnnnnnnnnnnnnnnnnnnnnnnnnnnnnnnnnnnnnnnnnnnnnnnnnnnagtaaggaagtggggggggggggggggggggggggacatctagaaagagaaatgtgattggcccgaccatagaaagttaacccaaaggaaaccccgggaataacaaagaaaagaagaaaagaagaaaacagaaaaaaaaaacaacggctgcaaatccaatccatccatagctgaactcgagccgcgatatggccgtttgtagagctgattggatcgacacaagccgaactaacgcccttagcctcgcaagccgtgtcggaaatctctacatcgtatgccaagttgatcccgatccactttgatcgtaacgcttttcttttaccctagatatacggtggatcgatttcagctggtatctctgcctcggagccccaggtgtctcgttcaaaataagcctctacgatgtgtcctttgtccttgcattagtacggagtatgtacctgaaagcaaattcgtctttgcatcagaccatgtggggcattggggcattggggcattagggctatcttctgttatgcacttcattcaagtatgtataacatccggagcagagtacttgtccatagtactacgtagtattacgatgtatgttgtccaatatacacataattagatctggtcttgtagattgaacaataaaatggaatggaatgaaattggattggattgagtcttcaaacagatctcatatcgcaaacagaaatacagcccaaaaaaaaaacaagaaggatatcgtagctataaccaaaaccacgcaagtaatccaaactcattttgttatttcacagaaaggcagtacacacggccagcgctatacccaccatcccacacaaacccctctattaaaagaatcatataacgcccaacaaggctcacaagcactcaaaaaaaaagtacaaggcaaaaaatccgaaaaaaaaaaaagaaatcccgcaacctcaacccccacgcaacatgcatttgttcctatttccaattttcatttccgtttcattactttacctacccacaacccaacgatggatcacctccaaggacgggtcatcgtcaagccagtgaccagcgcgcagatccgcagctcgcaagtccgccacgacatgctggtctgtgaagcgcgccagatcctgatggagggcggcagttgcgctcttcaatgctgcagagtgctgggctgttggaggggagccgcgtagaacaccggcgcgcgtcatggcccatcgccgggctgcggcggcgcgcaggtagatcttatgtgcttggaatcggcgtgcgctgctgtccagtatgactctgaaggatgatgttagcgtcttcacataattggatgttcaggttttgctgtatacctttgtagctcggctttctcggtctccgcgttcccttgccctgtcaccgggcagggttggtagttggcggacattagggtctgggctgaggctagggactcgcggagtactacgaagccatcttcccagtattcctcttgggatacttcgacctgctgttgcgagatgtggagcaggagagtgcggtagtcgttgattatctcggcgactcgcatagcgcgggcttgattgactgtgcgggtattagcaggttgtggttgtttgattggttggttagggtaagcttacatccatctgccatgttttcggtagattaagtatataaaaggaaggcaatggatcgacgagtagcaatgatgcaaaaagctagtataaagaacgggctgcaaagataaccaatgagagatgaaagaaaggcaatggtcagaggaattgatggcccacgaagtcgagaatgttaggccaccaacggtttccgggggggaaaagaaggagagatataagtcttcaaagattggaaacagtgtctctcgttaccccatacatgatcaatgggtggaccaaaaagggaaaaaagccatgctataaaataataataacataaaaccaagggatttctcagcctacagcggagccgacgtcaggatacatcacgaagagaacgagctgcaccaatagacgcgcaagatcccacgatcaggtagttcgggttgtcaagcacagctgggatgggacggggccacaccataagctcccgaaaaaccgtttacggcatgacaagggccatcctgatcccaaggagagggatcggtggagaaagagagaccagaagagaccaaaagaggcatcgcatattaaaaaaaaattggcctatggaattcccagtatcccagctgtggattgggagtggatagcgttggcccgcatatgagattaggttcttgcgccgatttggcgtttctggtgcgaatagagagatggtgtttcatgctgctgattggagaatattgaatgaactactgactcagtggggagtcatgtttttttttttgttttttttgtccttttttcgtgtcgatgcatcattcccaattcctcgtgggaccctctgtcgaaattccgaaatagaaagagttcaaggtaaaagggacaagacctcagccttggacctgcattagacatttcctcggacctgaactcggacttgacgtgtagtggatctgacaagtggtgaacatgttcagctggtatattggcggagtatttgccacacgtgtagtccaatcagatgacgagaacagcctccttggataatttatcagtaagccacattgtggcgcccacaactcctagtagctgtctactgtctccttgctgttaggtaggtaacactgtgataacctggtagcgaagcaagcccaaagtttgcactggtggattctctaccttggacaagctggacaagctggatatgatctcgggccatccgaaaggggtatcgccgagagatgagattcagtatagcatcaaggtatcgtgcaggaaaataattgagttatcattcacagatcgtctgtttctctaaaataaacaccggagtccttccattactggtctcttgcctccatagcttggacccagctcactcagtccttctcggctatggcttgcagccgttcatcaatctcctcttccgtcagagcacggaacgctgtagtggtcccctcctcgccgtcggcccgcggcccaccgacgacaccaatctcgatctcgtgcttcttgaagtcgacacttagcacattgctgagggctgtaatgcccagctccacaacctcctcccagctacccggggctgcatctttgttcttcagcttcttctctaggtagttcaacgcctcctgctgcttgggaccggatgctgttgccttgtacccaacatagtaaccggccgggtcacatttgtagagctgcgggccgctctcgtcatccacagagatcaaggtcgtagccacgccaagtggccgcatgtaagcctgcgaatttcaaagagaaccatatcagctattctgtctcactgggtcgtacggtggcgggaaatcctaccctttgtgtgtagacctggctgatatttgccagtcgctttgccaggacatcgcatggcatctcatatccgaacttgtaccggaactcagcagcctcaccacgggcccggtcaacggatgcgcgagcatctgctatggaaccggtcatcacacagcctacggaaggcgaaatgcggaaaacatgtgaaacggaggacgggtcgatcaatttatcctggtaaacagcgagtgtaagcgcaatcccagcgataaaccaggaattcatcttacagcgactttcttctgcgagagtaccacggcacaatccttgcccctcacaccgatggaggtgatgttggctgaagtgatagccttgaatgcatattctgagatatttggtcagcggtcatgatgacagcgaacgaattgaggatgctgggcagatcgaggcggaatcatcgaccagtggataatacataccaacttggtacagtcgaccctggtcagagaagatagtgatatgtctgtcgtaggcgcttcctgcggagagaacgaatgtcagtcggggatgaagtcatgaggttgggctgggccatcatcgacgatggagcataccagacatgacggcgaatcttcaagtatttcaaagctggattaatagaaggaaaggaaagaaatgagcaaggacggtccaagaggatgagacgatgggggttgatcagtgacgcgtgccagagctgcctgagctcaagcttgaggtcagcttcaccgccttccaggtttctctatcaacagttcaacagcacatggtcatttaccacgaatgagctcgaggtatttcacaggtagtaagggccactgcgtgaatgattaaaagcataactcagacttgttattgttattttctttgacctttagatgtgtgaaatatcaacttggaagagaaaatgaaccaactacacacacatacttcaaacatcaatatagatgacatgaggataaaataacttttgacatgaacataattacaccgtcccaaatgctatggtagagatatatacacatccaaaccctaggtagcaatgcaaaccccaattcaatagaactagtcgctgtcgctttcgctactcgagatctcgatctgagcagtcctgagctttcgcttctgtgtcttcttcggcacagcaggctgtacctttgcttcacgaactggtacaaacttctccttcctcttggcagctttgctttccttcttcgacattgtaacaccactcgcggcacttttcttggccgaagccggggcagcagacgacttgtcatcactgtcgctgctgctgccactcgatgaggtctcgtcatcgttatccggcgcgggcttgctagcaggcttcttcgaagccggggcatcatcatcgctatcctcactgctgctgctgatatcaacgaccatggttctgttcttccgcttcttggttaccgggggttcggcagccttgggtttcggtttcgatttcggcttcttcaaatcctccgcgctgaaaagcttgccggcaacagcgaaaaagaccagctctgctcgctgcctcttcggtaaacgctttagaacgtctccctccaacttttccccgaagttgaagttgtccaaatcctcatctccctttggcaagcactcgcggaacgcattgatagcttccaggtactcggggcttgttgaaggctcctggttccccacttcttcatcctccttcggcttgtcaagatccatatcggccttgatcacgtcccgcgcagcatcgctcagtcgctgcttggcggcatcacctttcaggccctgcatgtacgccagcagcgacgtgttgtacttagatgggacatgctcaagcgaatacaggtgcttgaacagattcgtttcccggttcttctggaacttccatgtcgcgcgtgctcggtggtagtggctcagatacgagagaataggcgtctcgtggattggggcttgagtcgacgcggtgccgtcttttctttgcttctttttctcccgcttgcgctgcttcatctgttcggcagtcttgtctccaacgtcttcggtgtctgcttcggctccgtctgcgtccacttcgttggtagcggcggcgtcattgctgtcggcttcgtccgactcacttgcggagtcgccatcgaattcctttgttccgggtccgaacgagactcgctttttccttttcttgtgcgattcatcctccttgccattctggtcgctgtcatcttcggtatggcggcgcttcttctttttcttcatttcgccgtctgtctcgggtgccgtttcctcggaaatggatttgcgttttttcttatccttcttgtcggacttggcatcttttttgctggaagtggactcctgtgcgtctgcacttccctcttctgtagaatccttcgacttcttgagcttcgatccgagctttttcgacgctggggactgggcgtccgtctggtgcgccatcgttgttgtggtgggttgtgatagggtcgagcaaaattcaaatagaattgagagtagcgtgacgctctaaagaaggctggaatctgaaatccagggcctgttaatgcgacctcgactgtggtgctaagacggttggcggagactactttttttctgccgatcaattgcgcgggccaatcatgttgtcttttcgttctacatactcccgaggtctctaatggctattaagggaatcaattgaaacatgtcgaaaatatggatatgggtggattgtatagagccattagttagaaaattgtgcttaggtatcttgctgatctagatgttgtatactatcaactagattatacaagctctgtgatcaactacaacatatacaaccacatacttattggtggacccgtcatctgtggataatagtttcagaaagtgattcaggtaaacttaaggtgtcgtagcctctagtcacccgtaggttggagtcattactcttttagcatctcatattatattcgttgatatttattcagctcttgatagacttgtatacacttggatgaaaaggaaaatatcgtagaactcgtcaattgcgttaatgataccctaagaaaaatgtgacagctgcaggcatctatgtcccagttccagaagcgaagccaggatcattagccccagtatcccttctctccctgcgcacctccttctgcacaaagccctcactcccggagcctgtagccgccgcagacgccgcagccctccgtttcgccttttcccgttccttctctttttccttatccctagcgttcggaccagccgcctttcgccgtttaggcagttcatagacgtcgttgaagttcatcaccacgcctaggaagcgcatgtccacatccggctggtacgacagatcgccgaggaggacagtcagacgggagcggaactcggcggagagttcgcggaggcggacgcgaagcgaagcaagcatattgtcgtcggcggcgagattggggccagataatgaaagcggggtgttgacgccgtccacgccggcactatcgggtcggacgtccggggtcgaggccattgaggccccggtgcgggtgctggggcgggagaggagatcacgctctgtgagaccccattgaccctgggcggagcgagtttcgatcttggcgtttatctcctggcggcgggtgaattccgcaacggagaaggagtataggccatccacggcatctttgtaggcaagcatgaacttgagaatctggtggagttggctgaggaagctttcttcgggttgtttggcggaagtcgaggtcgaggtgccgtagcgcgaggaggatgcagatcctagtagacccttgtgggtgatggagttgaggtatttggtgtgtgcttcgataaggtcgtccagcgtgcagtccggtctccggattgcctcgagcagttgttcccaactggactcgatgacttcgaacaagatatagtattggagctggttgacgaagtggatcatttctgcaatcacgcagcgtgctcgcttccagtctgctccgactttatcctccacattgccgagcactccgcgtgcaccggtcatgcatcgtcgccaggtgctgttcagcgcgaactcaactcgcttgatgcgccagaggaagttgaacactttcaagtattgagttgacgcccaaggtgtgatgaccacgtccacgggagcatcgattttgtattccaatgtgaagcaatcccatccaatttcaccgtggctcagctcgagcatacgggcatcaaggcgacgcagcacttcgggggtatcatattgggcattggaagcacggatagcatgttccagctgtgcagttagggtatgtcgatattgtgaatttgctggacgatccagatttgtggcaagcgactccatgagtaaagcaatgaagtctccttggcccagtagcaggtaactcttcagtgcttttaggtgatcgaggaggttgaatttcccattcatcagggtaatcaatcgagccattgtggttttatacgcctcatcaatggagatctcgagagtggcggtgtcaccatatcgaagctccttggaggcttccttcgaataggcctccacccaagccgaatcgccgcagccatgacggatgaagttcaaggattttccaatcaagaaaatcttctttgcaaactcttgcgtaatgattgaaggtaccatgtcatcatcaagcctatatttgtcctcccaaacactggttgcaagccgccgggggtcagtcttcggccggaactctggatcagcgacaaagaattccttgtatggatctgacagttcgccatcgtaaatccatagtcgtagcatgtcgtagaatgggcgtgtcacatgtgcaagaagtttctcggcgaatgcacacacgaaggggtctccgtgggatgttgaaaagctgtgtattaaggaaatcaactggccgcccctcttacctatgatatgcgtcagcaattgggaggatattcatccgcctgtctacttactttgagcctcttccacgatcaaactcattagtcgaagggccatggtagcatctctcgtccacacaacgcatcgcttcaaggtaacgccaccctttcgtacaccttgaggctcggttccttctccaatagcggccagcgcctgtctgatttccgcctctaatgtagccactaagctaagatatgcgcgcagctcaacggcaatggcagctcgcaagctctggttcaccagtccgccttcttcgctctccacaaacacagacagccctttatagagcagacaaggctccgccaacgtgttaaggagtgaggttatcggcgcagacagattcgagggcaatttcaagctcgacgcggaactaaattgcagattcgacgaagacaacccttgcaagttgaacggaaggtcacgcagtagcctctgctcaaccgacccagaccatttcgccggtgccgatggattagcagtcgagggccgagacgaggcagcacgaacatgttcatcgctggaatggtccttcactccagtatcaatgcgagtagctggtatgtcagccgagttgcgcctagcctggtccacgccatcacggtcaatatcacgtcgcagcgaactctgtcgctgtatcttcgccggcaatacgggttggtgttgctgcgaagccgacgagctaacagcgggaccctcctcatcggagttgaccatcgtgccccgtcttgggcgtgcaccatccttcctcaacatattgtgcaagtgcgcatcttccatcaacgggctccggcttcgttccccgccctctaactcatccgaagcagataacttataaagcagaaagaggataccccatttctgcgacagcacaggctgcgtcaggaggcgcgagtagagatttgaaaaccgcaccgccttatccgggctgacattttcgcggcgcagcttgcgcttaatcagatcaggcgcgttgttgatgctctccgttcccgcgaaacttccgcggcgtccaccaagcccagctggtgatcctggatctggagcgttggtgctggcgtgggtgtcgagaatgcgccaggcgcgctccatgaggacatggtggcggcggctttcggctgaggcgagcgcttcctctgtgtcggagtagtcttcgtcttggatggcggagatcgggagcgctggggtcaggccatcgactagctgggagagggcgtcgtctaagcggcgcgcgcgggcagggttgcgggctgggtttgacattctctgcccggtgccctagtgggcgaattggtcggggtcttgtatctggaagtgcttggcgtctgtgggtgctttgtttgagatattgtcggacaagagattacggtcaggcagcgggtttggggtgaaaatgtcgcgaatcaattctgacactagattgtataattttaatgtatgcctgaggtgaatatttcaattcggatctcaatagaagcaacgcggactcaagcttgaagcttgagtgtttgtgtttgagatgtttggcgcgtgtgggtgccaatttcctaaggcaccacgatcttatcgtcctatcgctagttatcagagtctttacccgatatgaatatccctgtcatataaaacttcaaggttgctcttacgacacatctcggctcacaactccatgtcattccattgtgacatagctcttcgggctaaattgcaagaattttcaatgaatcccctcacaacaattgaatatctgcttgagcctacctacacacttcaagaagaccggagcgtggccttcaccgggcaatcatggaatatgcgcaagggacttggatttttcggtctgaattccagcgattattgggctcaggctaagctaatgcacagtcagagcgcaaccaaggtgcatgcatcataggggctatgattcggggcaaatcctcgtagacccgctatagtgacgtccataagtcgttcatacaagatctgtaggatttggagccctagaggccctaactaaaaaatcattgattgattttattcctgttttatctctgttctttatatgttcttccatttctcttcccatgtccatactttaataaaccaaatgtacaatctcctagtatggacacaggaacatctacctctgccaacgctcggccatgtttccgacttctaggtaatgcaaagctcaaattactcgctgtattcttgacgacctcgacaatcctcctactcacactatattcggggggcttgtccgaaaacatctcacctagcgcgaaagacgagctagcgaatgagaaagactactggacatgggaaacgagcactcgattccagaaatccaagcatgaaaacgacagcaatgacactgggaagtcccaaaatgcgacctgtgacacattcccgacagacgtgctatcgcgcgtccagatcatcttaaagaccagcgcaaccgaagacccaaaacgagtcgatacacacatggcctctgtaacccgctgcatttccaacttactagttgtgtccgacaaagagaccgagctccatggccatcgcgtacacgatgtcctagccgatctaccaccttcagctcgggatctgattccggagttcgaagggtatgatgcgctccaacgcggggagagtaatgtcgacggcgcgacgggctggaaactcgatcgattcaagtttcttcctatggtggagcgggctagaaaagtcaaccccggcgcggagtggtacgtctttctcgagacggatacttacttcgtatgggataacctgttccgaatgctgggacagttcgacccatccttccctctgtatatgggctcaccggcgccgggccgcgatatcggtaatggaaaagtcaactggtttgcatacggcggctcgggcttcgtgctgtccagagctgcggttgatatattgacagcgcgggaggttggtaaatacgggcagtttattgggcaatcgctcagcgaacagtatatgcagacggtgaaagatgactgctgcggcgactctgtgcttggatttgcgctgtgggaaaagggtgttgagttgtctgggatgtggccgatgttcaacgcgcatccgctggactcaattccttttggcgacgagcatcactggtgccagcctgcgatcagcatgcataaatctcgattgagtgatatgaccgggttggcgaactgggaaggtgagcgggatagaacggtatgattcggtttgctgaacctagtggtacacacatgcacatgctaatccatttcaattcagaagcccttactatacgcagacttggttgattaccatcgcctcggacagttgccagaacggaaaggatgggataatggagcctggggtgggattatcgaacatcctgatactctgccccagcatgggtcattagaagcctgtcgacaggcatgctatgacagggattggtgtatgtcttacacttatgataccgccggggcctgtgtgtttgtgcagagcttgcgacttggagctgctagcaagctggaacttgcggaccaattcacggctggatgggacaacgacaaaatacaaaattggcgggcaagcaataagtgtgaaaagcccatgtggatgaagccgagtttgacgagaattttctgaagcgctttaggtacacgacttcgaagtgatttgatatacgttaataatggatatacgatgtctgaggatacatataattcctacagatcccagggcttaagagttgcaatcatgaaatacaacgaccctctacatccagcgatgtaccggatgaagatctatgaatctataacgtgacactttcaaagcgattgtcgattcatttgcccaaccgtctggttcaaagaaactagtcaaaacacatcaaaaaatcacaaagccatccgtacgccgcccaggaatcatgtatttcgacacaagcaacccacaaatgggaaaacaaacaatgcaccgaagtgccctcaagtattagacaagcgaaaggtaaagaatcctcggggccatcaaggacaaggattaaagaaaagagaaagagaaagcgaagaagggtaaaaaatacaacaagggaaaggggaacgtcataaaagcagaaagaacatcaacctcaaggtagccataagtagaaagaagaaagcatctcatacgccggattgacacaccctcaaaaaaaggtcattccagaccaccaagttagtccgtccatttttgagtcgtgaggatcattaacacctgcccatgccaaaacagtcggcgtagccttagccgaaagaaaccgcgagtaaaacaaactcctaggaagaagagatcaaccgccggtatagcggtgaactgaatttcctacatgcggcgaaaagcaagataggtatcttgagatgagaaacaaagcctgttttctcaccgacgcatgccctgagtagggatgccgccctgcatacccatgttgggcggcatgttatacccgtggtgatcgtatccggctgacatgccgttcatcataagggaaccgagcccttgagcctgggagaccgggcagtctttgtgtgccagcaaaagagtcttgaggttgacaatctcttcacgtagttgagtcaccgtcgcagtaagggcatcattttctgaggtgaaaagctccaccttgttttgaaggttagccagccactgcttcttccgttgacgacatttcaaagccgcgacactgtgtacaaattagcatttcaagttcctgaatgtaaggtggtcattcataccgattccgctctaggaaattgcgtcgtttctcctcatcggtcatcttcttggtatccattgggaattgcttcatatcatcgtcgtcttcgtcctcgtcatccatatccgaaggcatatccatgttgggtttagcccttttgttggaacccttcggggcctcttcggccttgcggcggttattggtggagcccttggtgttctttttgcccttacccttggcgggtttggcggattcacgatcagatgcatccccaacactggtaccgttggtgttctgggagacacgtcgggcagctgcggatcgagcatcatttgacatttgggcatggttcattggcgcattgttggcctggccacccttggccagcatgaacagtccgttcgccgcatctgccgcgtcatgctgagtgaagtcagccggccgagctggctttacttccatattgacagccgcctggtcctgctcattggggttggaggtgggagcatttgaattgttcttcttcgctgtaagtgcggtgcggtggaaatcaatggtggaaggagtggcgccaccgttctgaagttgttgcaagagcgcctgtgagttgggactgggggccgggaacatagagcctccaccccccggtgtcagtcccgtgcggagggaggactcgttcggggtagggaagccgcgaccgatgctgtcaaagtagtcattggggccagtgggcccggggaccatagccggactgagaggacccgcgcgtagggagttgttccaattgtaaccacttgacgaactggtgccaggtaaggccggtgaagtcagggcagccaccgagggaagaagcgatttgcctggggtgtcggccggattccctccaaaggattgctcaaatggattgggctcgagggagaaaggattgtgcatggaattgaagtagtccggagtatcagacgcagtaggcgcacccggtcgtggaggtggcgccaacgaggtctgagtctctaggttagatttctggtcctttgacgcggcctgcgagtctggcggagaggttcgagttagcaacgcgccaagaattaatgcgatcgcaaataggtaccactgcggttttgggatcgagccggtggcttcattgtgtgtggaatatgcatgtgttggtggggaggaaatcaatgacgccagtgggtgaagtcatcgcgacggcaaaggacttggggggaatttaagggtcggggaacagtggcgtattaccaaaccaaaaaggggacttttcttttttggaagtttaatgcagaacaacataaaacgagggcagcagctccataaaatcgcatatcacagtatggtaaagcaaaagtacgaaggaaatgcgcaaaaaaaagtgtcgtgacacgaaccttctttttctgccttcttcgagtccataggggatgaagacatgtttgatcgcagagtcgatatggctggggcgaccagagcagacatttagctgggatataatggatataaaatcggtgaagccaaacaaacaatggcttctagatagtcggagagagagtgagaggaagagagtgacgtagggggaagagggatatgatgaaatttagggaatttgggggttttgctgatgaaaaaaacagaattacggtcatgtattgtattggaatcagaaacgggacggattctgtgtgtattcagcataaatgacggtaactggctttctccgaatcaggttggctgttcgtctccaccagagacacattattgtgttccttttctgctgttccacatccacgttgttctactatctcagacattctacgttctgtaccatgaggaacccctacacccttacctcggatcttcaccatacggcagaggaccaattggatataccaatcctcatttgccagtctagctgcgagaatatcaagtcgacgcttgcatctttgatacggagtttccaaggttggtctctgggtattatatccattatgtcacggtgacgacagaaatctctcccgctgtgggccatccaccctctgacagccaatcacaaaccattattccccagtgccaaggccagggatatcagctaacccgtagaatgcggtgaaaacgatgacgcaatcgatagcacgtgagggctctaccatggaattctagctagatatcttgatcttcagatatgtagaacgttgatagacagactatacacatgttggcagggtagtagatgccaaataggagacagcgagggctctactacatcgtacctgaccgagatctgtatgtgtaagcttgtacaaccccatgtaaaattattaatcagcgacccacctggtatccatggatggataccccgtacgcgtcgtattcatacggagttctccgtattatacaagttcgagatcgcgtccactcggttgtacagtacccaaatacataacattgctattgactctcttctgacgggccctggtctgatgcaataggctaatcccatgtagaaaggggattttcttactgtactgtacccggtagctggtacgaagtaataatcttatattaaccaactagttaggagtgtcgcgagaacgtgtggtccattgcatacatcgtgtcaatcttaaattgaacgccaatcctttcgatcgttacaaatagtgatctagcctaaattagcctttactcactatgccattgggtcggtttgaggataggctgttcccacaacgggagagacacttccccacagtcttggtatgcttcaaccttgattgtacgtatatgcatcacctgtctattgtgaagtagggtgctctaagtggaattagcttaattgaaatacatattgaagctaatatgtcttttgaaataacgacctcatatcaaatagtataagatgttacggatgaaacattacttccagcagtatagcagaaaccaacacagtcgagatactaggcgatccatttaacaagcttcaagagtaggctgcccactcgagctcttagcggcatatagctgcaatatcaactaccttcaatgcatgacttactccgcggtataactgctgaagataggaaagcccgaagtatgacaagatcttcagtgtaggagtggttcgtgtgcggtttctttttccgagagcaagtggacgttcgatattacatctccagtaaagccgttatcctcgccttcctaaataggcaggcaccccaaagtctacacatacctagaagcgcaaccgattaatggaaccacagccaagatttacgcttggaaataacacattcaatagagatagtccattgacataggaattatatctatcaagccctggaaagattggaatatttacaattcccccatcgttaaagaaccctcaattataccacaacttcacgaaccccggtaggtcgagtagttccaaggacccagcaggacaggaacatgataatggcgccagccctcctcgccctcgcgaccccgtcccttgacagtgaacttaacctcaacctcaggccagaagctctcgacgccctgggcctcataccagggacccacgtcgaagcgcacagaccagttggtcttgctgtctgcagcaggcagcgcagccaagatagcaggtacggactccgaggctgttccgacgggcgtccagttggcaacgcggccgtcggcgttggtggttgcgcggaatgagatgctgctggcggtggatgcaggcgtggagaggagagtcagggtcacgggcaggttggctgcgggtgtccctgataacgtgttgaggcaatggcaggtgatgggatcgcgcgctgccatggtggtggtgggttgcttgattgggtttgcgtctttggtgtgcggggccggggagatttgttgctgataaagtgcgaggcggttggtggtgcgaccaagttgttggttattttgaggggagtccattcattcaaatggtagagggaatataggagaagaagagaagaggggagaaagaaatacagaaggaggagagctcgacattgctatcaaaggttcatcggaggataccgatggccgcggagagtgccatgcagctattaattgggggtctatgacttgcgcatgtatgctgtatagcttcttcgcttctcctctttatgactatctataggaaatagaatgatctctattttgacagcttaaatgcgactttggattcgaggacaaagagcttcaagtgccatagaaacctttcgaattactagtagaataatcatgatcatcaggagcctgcctaaccatatatattgaatccaagtcaattgtacgatagaattagaaaaacatccaaaacgacaaagttgaagcgcatgatgtgaaagtcttgtcttccggaaagttcgatttgcggggctacttcgccttcaacttcccaacttcgcaacattcagaacttcaacaaatcatacacaatgtccgccgtggtacatagcgatgacctcgacatggagcctacgctccagtcgattctcaaccaacacactctccgttggatcttcgtcggaggaaaaggaggtgtgggtaagaccaccacctcgtgctcgctggcgatccagttggccaaagttcgcaaatccgtcctgctcatttcgaccgatcccgcacacaacctgagcgacgctttcggccagaagtttggaaaggaggcccgcctgatcgatggctactcaaacctgagcgcgatggagatcgaccccaatgggagcatccaggatctgctcgccaccggagatggtcagggcgaggatcccatggcaggattgggcatgggaaacatgatgcaggatttagcattcagcgtaagtgctatgtcgctgtcgcgtaatactctacgtgtcaatctaactcttggtgttaccagattcccggtgttgacgaagctatgtccttcgccgaagtcctgaagcaggtcaagtcgctttcctacgaagtcatcgtgttcgataccgcgccgaccggccacacccttcgattcctacaattccccaccgtgctcgagaaggcgctcgccaagctctcccagctctccacccagttcggtccgatgctcaactcgattctgggtgctcgtggcggtctacccgggggtcagaatatggatgagttgctgcagaagatggagtcgttgcgcgagactatcagcgaggtcaatacgcaattcaagaacccagacatgaccacctttgtgtgtgtatgcattgcagagttcttgtcgctctacgagacggaacgtatgatccaagaattgaccagctacaacatcgacacccacgcaatcgttgtcaaccagctcctattccccaaagaaggaagcagttgcgaacagtgtactgcccggagaaagatgcagaagaagtacctcgatcagattgaggagctctatgaggatttcaatgtggtgcgcatgccaatgcttgtcgaggaagtgcgtgggaaggagaagttggagaagttcagtgagatgttggtgactccatacgtgcctccgcagtaaaggcgatgtcgaggcgagatattttgttttcgctcatgtcggacgaattatgaaaagactagagaatattacgtgaagcgttggccttctgtggactaagattggaacccatgtagagcatcaggacatgaattcatgcatattctgtcgcatcttgactgacctgtgatgaaagtttgaccacatctcggtcgatcggagatacaacacaatccttgtcaaatgacattggacctaatatatatctgcgagaggggaactccaatcgttccctaaactcgtctccatctaccacgtgtttcgaccaccccccatatacaatatgatcttggcaatttagaatgcatgccctcgaagcaagtgtatgcccaaaagcgagagatgcagatgtcctcgctgcagctcagtggtccccgcgatctcacggccacaatccgtggtgccacgacaccaccgcatcaagaaccaatttggccctgcatagatttgataaaatctgcggtgagagaaaagcagacgtcagaagtcacttccactttcaaatattcctacaggtactcgtttttagggaaatactcccggagtagtccaattctatgcgccctgggattgattcgagcccgatgctcctccatgcaagcctcacttttgtccaagacagggcccttgttactctatagtaaggagtggaaaaagtgggcagaccaggatcccgtttcatcctgacggtcagaagctctaaattgacacacatcaaggtaggggaaaaaagggttgggcctcgttggccgataaagtgaggcggttctcttgtcctccgcccccgaacgttccgacatgaaccctcccctcgaggggaggacgcagaatctgagccgtctctggtgatttcctggtttcccattcttctttccgccttccgtggagactcgctccagagttaccggattcgtgggtatgtggttggtttaatttgcctatgtgcagccgacctggtggatcgtgctgttggaagaagggggggatacgcggtcccctctgccgttgacttgttgtgaaaccatattccgaaggatcaaggttggagattagtgcatttccgatagagatctgtcttattcgtctccgtctctggtgggatttctattcgatcaaccagagtatcaaccaacatatttatactccaagtctcgtccttcggagctgtgccaaaagtcccaaaaagagcttccaagcacggaccgtgtcgaactagcaaccctagcccttacttcgcctcgccttgacgcctcacctcttagccctggcaatgtctcccgtccagcaatactggcttccgggatatgggttgtcccgacatattgtcctaggccatatccagtactttcttggaccaaccgcaacagtcagaccctacagttaccaggtatgtcttgccattgcttccactacaccttctctatagcctgttctaaccagttaccattgcaggggcgcgagggttatctcatcaatggcgtgccactcacgcgggtttgtttcccccatctttatttaagcatgaattaagattggaaagagagaaagagaaaccaaacattacacaccactaacgcatccaaacaggaacaaattgatgatcttgcggtaatgtcccgcgagtatgagaagcaagaagctactcgcatggcccacaataccagcggcgcctcgacttctagccccagcagcgacaacccggcagctcagtctgagccatacatcaatgaaatcatccctattaaccaaccgggaacacgcaggcctgcagactcgcgaggcggtcgttgagaccgacgttattccattgcttccgtccattggactcggtgttccttttccagccctgggctccgttctaggattccgtcggccagcgaacatcatgaggatggaactccttgtatggcctgctctgtttagccttcgttccccgggggctggccacatggatacccaacccctgagttctgtttcccaggttcccaggtgaatacttgaatcgcaaagccaccggatggaccagtggatggaaaagaacaccaatcctggaatgggagcggctgttgtgggcaatagcggtagccctgttttgagcatgtgccttttgtttcgttctgatatacccttctttcaacccttttagtttcttataggtcaaatttgattttatacatttgaattcgggattcgggactgttagcatataacagattataagctcgactgatattttggggctgggagcggaatgatcctcaactatggctggaataggatataaacgtcaaacgagtattatgctgacacccagaatagaatcaatatatttagttctccaacgctgatatgatatagttactaggtatcaataacattctatgttgaaaacaaggatacttcggaacaaatattgccaagaaagacatcatctttcactcatctctatagaccattcgtaacagcatagataaatcagaccctaagatcaaagagcctactacatcatatctccatctctcatctttttttcccctccaaagattcgacggggggcgccatgagtctctggctgcttttggggaccctccctgtaaacctccagggtcagaaatggccaatacataaagaggatctgacacaggaagtaaaaatatggggagagagtgattgcataagaactgcaagactaaagaggtaaaagaaataagtgtggacccccgaaaaaacgccagccggatgccactctgcatgaggtccccaaacaaccgtgttgtgacctacacggggggatcactggaaaaaaatggggcaggcagaaacaagttggaaatcacataacagagagaatttcagttttcaacatcaaggtcatgcgggtgctttttattttgcaacagccgagctcaagacttgtgtgcggaagaaggcacccttggtcttctcaatgacttgctggtagaccgactgaggggggtggttcatgataacagtgccctccttgtaatcgatcttggcgtcaacccgggtgtcgcgaataaggttgacaatccacttctcaccctcgtcctggttgagaccgaggcgggcggaaaggtccctaaaaaagaaaccgttagtctactgttcgtgccgattttcccaatgtaaataacttacttgatgtcgatacgctggtgaatcttgcagtagctctcggagatgagatggcgggcagcgtcaacgaaagcgtcggcagccgacacaaggaagaaatcgctgcgcagcacatcctctgcctcgccgagcttcttctgtgcttcctcgaaatcgaaatcgacgtaaagggccttgacgaaatcggtgacggggtcggtgtactcgtagtcctcctggcgcacaacgcggatcagatccttcaactgcttctggtagacaccggagtgcttgtgggggcggctgcggttggtgatgacagcggccgcaaggtaccgcaaaacccaagggcagctggtctggatggtgttgatgtaggcgggagagaagaagaggtcggtgaggacgtcgcgggcggggtcgtggttgaagaaggggaacagcgaccagtgaatgagccacgagcggttgttgagctgagccagggggttgttgaacaggcgagtctcaattgagtccttgaccttctgaacctcctccatcgcaccctcccagttggtggtcaagatctctgatgcgagcttaccccatgtggcggcggcaaccttgtcgttgtcggtggacagaacacggaactggtaaagcagttcagcggcatttccataactgccgcagctgtactggaaccgtccgtagtcgtagagagagttgaccatctcgttagtgacaccgtgctgctcctcgaggaaccgcaagttggcggccttgtcgcttcgtaggttgcccacgacctcctcatcctgcaacaattcggaaatcttctcgctctgatcctggtaatgctgtagcttggccagaacctcctcgcgcttcttcacaaactcctcgggaatcgtgtcggaatcgttgatctcctgccacaagttggcgacgtagtcggtcatgttggtgtgcttcaagagctcgtacttcgcccgagtaatttccttatcctcctcatcaccggtagcgctgaattcgagtagggggaagacgaggtgacggtcgaggtacgggatgagtcggggcagcaaatcatgctgagaggcgatatcctcggcggtcttaggctggtgagcagcagctccgctgagcatagtctccgcggtagggggggcgttgtctgccatattggatatcaaaagatggcagaggggggtaaaaggtctagagggggatacaaaggccaaccgcgatcaatggagaatttgcagattgtgcgggcgtcggtggccctaaaccctttttggaagtgggtgctgggaaagcggtggcagaaaatctgagcagaggagcatctgatgtcgctctccgatcttcccagtctctgccttgatatccccatattctccaaccaggtcctttctttgtgtcctttagaacgcaagaaatgccgtctcttctatactctagcccgccctcggccatgcgaaagcaggtctcggccattcctcttcgcgtcaactctgcgcagtccgtggcttccgttcagacatgtagttcattttccacattatgtcctcaggcaaggctgaaagcttcacgtacgttactttttgctcagtcttattgtgattgcttgatctcctaggaactacaagagcaaagccgaaccctcgggttctgtattgtcttgtaaccaacaaagagagaaagaaaatgacaaaaaaacacgcatctatgctgtgtcggtttcgtttcgaccgaggaaacggcgcatgactaacccttcatctcagatcgtcctcaattctccctccctactcttcctacccgtcaaagccgtacctttctcgctcagctcggccgtcaagcgcaagccctgaagcaacaatctaacaccccatcggcggccccatccccagccacatcagacaagaaatccagtccgaccctgcagctcaccaatctcccctatttcgtccgtcgcactgcctccaatcagctgcctgtctacgtcgtcacaaaggccggcggtaccaaacaactcaccaagctccagaagaccgaaggcgatctagtcgcgctccggaacgacctggcttctgccctgggtgttgttgatggaaacaagcccaatccggatgttagtctcaaccaattgactggccacatcattgtcaaggtatgtttgctttacagtgcaattaactgtcatgcgacagaaactaatatattggttagggctggcgcaaacctgagattttgaacttcctcaatgagcggaaattctaaatgctctcttctcttacacctcaaatttcatctcatgcgctcgcaattgaaggtctcaccaatatttcgagcggtccaagattcactctcaaaaagcatcatcatacctcttttgcgaggggtattctagagcatacttctcggagagagcaagaatcacatcacgtcgaaaacaagggaggggaaagaaagaaacgaacgctcacgatggtccctgatgtggatggatattatctatttccttgatctcttcttcctcttccctcggtgcataccttaatctcgttgcgggttgtttttcttccttttcttccttttcattttcatttggtgtttgtctcttgtttatccggtcgtgtcttctggcgtccacctgcttttttttttgtttttgttcccctgcttttcccatctgtaacactcaatctgtacattttcgatgactctatggatgctagtgcttttatattgaaatgactacatgcatttccattcggaaatctctcgggaaactcgtattgatgcgcagtatgtttgctcctgtctgcaattagaatgtaggccacgacctatttaatactatgcctgacgagcggatggaattgagggctgtctctgttgaaaacttcgatgtagctgggttgaactacgaatgtgaatctacaaattaaatgggaacaatgggcaatcaatcatgatgcaagtatctctcgatttgtgtcgagggtattttgagcattgtacaccgaatcagaacagaacgctatctcacgagaacaaaaataaaatccccatcacccaccagcgcccaaaagataagaatagaaagactgacagtcgacatgagagtacaaatgacatgagagaaaatcaagattgtcgtatatgctaagtggaagaggatccgattcctccaaaggcgggactggaacgaaaccaacctgtcaccagcgcattggaggttcatgcagacatcatttactccgccaaccgagcatatgtgaggagttggcgaacaacaccaccatcgatgttggggaggagtagtgcacctagcagactttcttttctgggaaggattccggatgggatgttaagaggggaggtgttgtcgacttgctttgatttttcggcgagtcggcgtagaatccccagtcctcgattgacaatcgagctgaaggcatatgcgtcggcttcggcctggcttctttgccgcatgttgatttgtgggattcgttctgtgcacagtgcgcaggaaagtcgcaggagatggacagcgaacccatcaactgactcaagccatgctttggcaagagagccatcggcaaatgtggtgagaacatcggccgacaaaagaccttgcatcaaaaacactttgcgtgcgtccacaacagccatgggctttttgtcggggacacaggatatggcaagcccaaacgcgcgggttaacaactctggctggggaggtgcagacccatcaccagagaagatggctttgaagaaagttcggttcgggtcatctctagccaacattttggccagcccgtcaacggcagctggggtgtatcgatcaaccgaagagttgaatgcagtaaacatcacttttccagcgggtgatatgggttcaggttcaggcgagaacgccaacaagaaaatcaacagattcagcgcctcgtccttgccgggaatttgaacaacatgcgccaagttactcagcaagatcactgcatccttcataaaatctaacgtgttgtggcttgtccgcaggaacatcttgcgagttcccatgtaacgaaagacggaggaaaacagctgagcgacaggagggataccgagagacaagaaattcgtctcgctaaacgagaaattgcgcaggatagtggtgatacagatgagtcgatcgacggcccggtctagttcgtactcaatacttccaaattcgggaacatctaaaagcgatgtgttttcagactggcagtcccgtgtgacttgatcataggaacggagagtcatagtatccgactcttccaaggtgtgctctgctagaaggtcggcctggtcttcagcgcagtcgatcaggctctctaccaagtcatcacaattctccaatgatatctgaacagatggttcaccagaaagtgttgtgagggtatccaaagcaactcgtatctccgcgtagatcccggacttgagcgccattgtcaaggcgtggatatcgacaattcctagttctgcaaagcctggcacatctggctttagcctcgaaatatcctcgccaatctgatacatctcatcaacggcaatgggcccgtggaatcggtttcctttcagaaccatgggtttgaaggtttcctcaatagggcgttttaccagctgctcggatttttgttcttgttgtcctggctgctgttggcccggaacaggcgtaacacccttcacagattggggagaaggagctgcgaactgtccggtggcttcggtgagtggaacagctggttgcgacgccctcgagatgcttgaccggtgtccggcctgtgctggcctgctttggcttcgtgcgtgcgttggcgttgcaaatccattcactggggcattattatgaattggcgtgtgattctggggggactgtgctatcgcctgggcctgctcaaagcctggattaggcttcactgaaggagactggaattgactaggcggccgctgtatgccgccttgatgttgcagttgttgctgttgctgctgctgctgctgctgttgttgttgttgctgctgctgttgctgttgcaattgttgctgctgctgtaattgctgctgttgcatttgctgctgctgttgctgcatgtggtccgccatttgtttttgttgtgagctgatgaaagcttgttcgtagggagccaaattccttgagtggtgagcttgaatctcctgggcagccataggaaattgcatctggggaaattgcagctgatgtgcaactgctggccacatattcgttgctgtgacctttttcgaccctcccatcttcatcacggtggcgtagagctgaacgaggttgatcggacgtccactgacaataggatttgtgtccacagaaagattctggctcatcatgaatttttgcaatgagcgcaaaaatccttccgggttactgggttttgggacgttcgactgcatgttcggtggcatttgtctcataccccccatggactgctgaggattacccatcgggttcatgcctccttgaacctgccgtccagccatcgtggcattgggattcatccgtgactgttgctgcatggcatgcagccgctgttgttgattcgctagagcttgatggtagccctggggtacttgttgcatgccattgaactgcggcgcgagcatcgagggttggggaggtcccgaagtcattccaaactgctgcgcctgcataaagttggcgttctggggcgtatttacgcgactgccgtgatctgactgcgatggggacatatggggtccggggtgcggaccagcgggcgagaaggggctcggagaagccgttcccaagcgagcgctttgctgatcaaagtcctgcataataggcgaatgcgttacattcggagacgccccctgctgaagatgctggtacggcgttgggtgttgcggaaattgcggattgccgttggtcggtccttgataacctggaaacggctggtgaggggtctgagatcgcgaccccgttaagccgcccggtactggtcttggcgacatgggcataccatcttctggccgcgctcgcttggatggaatcacttggtttggattgtggaagcctggggaggcgttccgcggcacgccattattgaacatgcggaattgagatggatcctggggggtgggggagccatgaaggaacgcagtagagggatctatagtggatggatgaaaggcgccattatcctggccaggaatattcgaggcgtcgagccaggcattcatgtcgtgcggttttcctaacccatctacctaggacgagtcagcacgcgaacattggctcatgcaaccatcgctacaatgtgcaaatatgtcatctaagaatcaagcaagtataggattcgatccaatgatggacgatcaggtggacgcgtcgggagtgagatgtttgggagtcgcgcccagacccggtcgcgacacgggtcaaagagaaggtggggagggaaggcacaaccatggggaatattagagataataagggggggaaatgaggggagggaatgaggtacataccgataaggctggagtgacttgaattccgccttttatacggatgactgaagccgggtcccggaactggcagatggatatgaaggggacagaggttggccagggaaagtcacgtggtgtggaaacctaaggcaacaaaccacggaggaggacgggaggcaaaggcgtctaagatgggataatgggggtgggaagggggggggaggtcagaggctggggtaagctaaaatgttagcaaatcatagaccaggaacgtcactcttgatctttaaagagccaagctataataatgggaagctcgttcagaaaccacggggcaaatgacggttacagaacaagggcaggacaaaagggggtgcgtggccacaacccaataatctcaataccgtgtaaataataggaggagaacaagaaaaaaaagcaagcgacacgatccgatcaaccgaaatggtgtacttaccaattcacatccgttcagttagggatgaagggggaagtggagagaggagagggaaaattactgacaggtcagagctttcagtaacatcaacccggagtgttgtgcgggttacttgtgttactgggttagttcttgtcttttagaatctcgtcctgctgcagttttcttcgtcttttctcgctcgtctctttctttctcttttttgggcgttcatttttccccctttgggtctggatttcccattgggtttagttatcttgttcagagcgggtgttgccagcctcaacctgcatatgaaagagactggccacacatcggggaaaataatggggaaagccaggcaatagtggtaatatgaagggaattctctttctgaaagaaaagtctcataaaaatccccatcttcccctcggatttggtgaatcagcgaaatgatgatccattccaacggtctgcccgagtcaggttagatcgtatactccaaccccgatatggtctgaggttagcagccaccctagggataaatcccaatgagaaaaaattgccacgaaaaatggactatttccagaccatcatctggggggaaggggaaaagaaattatggaggagagaaagagagagaaaagatctagagccgcgacggtggccagcggttctccttatataaagctcgggctagcgtctgataatcatgtcgatgcgcgcccaatcctccgaaatcaccaaaaattcgaggttaacaactaagagtggattgacctgggttttctagtcacccccgtgctaggatccgactcgatccgcgtgggaaatcatgacggctttggtgcctgtcccacctaccgtgtctcggcctactccaccactagagatgattggatcaacttttcttcatttcccttctgtagggcttcgggggggcaagcttgaggtcatgactaactccaaggggacggatgcgtgtaactgtctaaaggcccttgcgcatggcggtccaatatgatattatcccacgtcgaacctgatcaggtgtccaaattgacatacgttgtgtatctacatgtcactagatgtaacaaataccccaggcagagcgtgagatcctcgttattggttctaaggctatatattccgcagtagccgctagcgtctgacgataaatttggattgatacactcacctggacaagattagtacatattgggtatctgggcacgatacaggaggattatgattagagctatcaaggatttccaaggttcggtgtaatttatcccacagttctgggtgagattattgcattgcaagttgacgggcgcttggtttagtagtgtaccgtatcgctaataattgccacaacattgaatctttaaccttcaaatgatgcgagtaaaccacatgtacgccgtattgtagaaaataatgggactaccaggatgtgggacttatgatatatttttcatgaccctaacaaactggaactaaatctacggagtacaacgaactgttggcaagaccagtcgacatcacgtgatggataagcttcctgccccatagcatcgaaagctccagatggctgaactccgagcccttcacacagcgcgtcattcaccaaccatcttcaaaactcatcacatttccttccatttccagctgatacacatactctcctttctcatcttgctcgctatccaaactatccaccatgggagacgttgccgtggagtacccggcaaacaacgtcacgcctctgaccaaactcgacgcccttgccaacttggattccctcgatggtacaggggctgatggaaatgatgaatatgctacccttaagaggctacagagacatctcgagtatgtgtgaccattatcggatggagtggtctgtactgacgtcgaacacaggtatatccaactgcaggaggaatacatcaaggatgagcagaggtatgcttattgagttctgttattgaagatccgtatcagtggctaactaccgtcgtccgatacaggagcttgaagcgggagctggttcgggcacaagaagagatcaagcgcatacagagtgtgccattggtcatcggacaatttatggaggcaatcgatcaaaagtaggccttttggtatctggatctctaggcgagatcatcgtttgctaactcacttctcttagcaccggcattgttcaaagctcgaccggttctaattacgtcgtccgtatcctctccactctcgaccgcgagaagttgaagccttcatcctcggtcgcccttcaccgccactccaatgcccttgtcgatattcttcctcccgaggctgattcctctattgcgatgctgggtgagaacgagaagcccgatgtgacgtacgcagatgtcggtggtttggatatgcagaaacaggagattcgggaggccgtcgagctgcctttgacgcatttcgaactctacaagcaaattggtgggtagttatggagatccattgcgggtaatgggtccgctaacaaatttcaggtatcgaccctcctcgtggtgtcttgctctatggccccccgggaaccggaaagaccatgctagtgaaagccgtggccaacagtacaaccgccagcttcattcgtgtcaacggatcagagtttgtacagaagtatctaggagagggacctcgtatggttcgtgacgtcttccggatggctcgtgagaactccccagccatcatcttcattgacgaaatcgacgcgatcgccacgaagcgtttcgatgcccagactggtgccgatcgtgaagttcagcgtatcctactggagttgcttaaccagatggacggtttcgaacaaaccagcaacgtcaaggtcatcatggccaccaaccgagccgacaccctggacccggctttgctgcgtcctggtcgtctggaccggaagatcgagttcccgaacctgcgtgaccgacgtgagcgccgattgatcttcacaaccatcgcggcaaggatgtcactgtcccccgaggtcgaccttgacgccttgattgtgcgcaacgacccgttgtctggtgctgtcattgctgctatcatgcaggaggctggtctgcgggccgtccgcaagaaccgttacaatattatccaatccgaccttgaagatgcttatgccgtccaggtgaagactggacaggatgatgatcggtacgtttcttgtttgtttttgggggttttctatgtcactaactgggttcttgcagtcctgacttctaccggtaaatgcttgagtttctcggggacgttggtacaagtggtaaaagcttggttttcctcaccagttgtattatcaataatatgcgccatgtgtcacaatgtttggattatgtgttgatcttacggtctccgtttagattgtagatgtagattgtaaattacaccctgcccgtagaccacttgcttgaaaatgcgtttcgaatgaatgttgttttaaatacgttggaaattgttccctgttattcttctatcgaataaccaatctgattgcagacagtgtgtatatattttagaagcggataacccgaaattcgcgatatatacctccacttacaaccaccagaatctataataaaaagcattcaagaaaccaaccacacataaagcttgacacttgccacttatcactcgaattaaaaaaggccacatagaaccatatgacaaggacaagcatactaatcggtacattcacaatgtgagcttggttatttcaatccgataatgctcctcccggtcgcgactactactttttgctttttcttcttttggccttcaaaggttacatacgttcttagtacgcaaaacgttagtatagttcaatatatatttacctatgcttgttccaagtagtagttatttccgatatgtatacggacattacggagtactccgtatgctaaaagccccattataaagttttgtttacccgcagttggtagctactacaacatctgtcgactaactaaccactgtccttcatggggtttgtagagaccttgttctgatttgatttaaataccacgttcgaactaaatatcccgaggagcttctttcaaggctggttcaaccaattcagcaatcccaattcagcaatctcttaaaacaggagaatctgaaaatcccatttcttccgcagtacgatcccgaatccgaatctatatatttgcttccacgcaggccttcctcccacggtcctctgacaccgcaaagcttcacctggcgggcgctgctagtcggactgctagtcgggatactgatcagcctttgcaacacttattatggcttacaaaccggggctggtgctcaactacctactgtgtcggctcttctggggtatctagcgattggagcacttgctaaattcaactttgcaccgctatcgaaaactgaaaatgtcctgatcgtaagcactgccacggcgacgggctgcatgcccgctacagctggattcaccgaggtcatcccagcgctcgaatatatccttgggccaaacgagggaggcccattccaactggagtatctgcagttgataacctggtccctgggactgagtttcttcggaagatgatagcgaagatatacactcttccagcatgctagcactcggtaggagacacatgagctcaaatagtggttatttcccggtggtgggcttcattgtgtcaatactagcctgtatccttaccacacattccgtattcggagacaaaatgccttcgtattacacggttgtctcgatcctgcttgtcctggcggtggcgatgactggcattcgtggtctggcggaatccgacttcaacgcaggaagcggtttaggtatggcctactctgtcagattatatcgtcgtcattccagaatatcatctctggcctgagatcgactaataaatatcttgtgtgaacagctgcccagctggttttggccgccataatcccccgctcaaaccctaatagcgtgatgatcaatatcctatctgctgcaatcgcaaatggaggtgctaaccaggccggcgatcttgcctttgacttgaagatagggcaactcatcggtgcgccatcagaagtccagacctacggccagataataggatcgattttcggcgcgcttgtctcttgcttcatgtatagactgttcaccaaccgattcccggttccaggagacttcatccaggtaccaaactcgttcctgcaagtcagtaccgcgagaatggtcttgaataaagccttccccctggtgtgggtggttacgccctgggctttggaattttcctcgccatttcaacagtggccaagatgaggtttcaagacaattggtggcatgtttatattcctagcggagtttcctttgccattggtaagccgttctctctattttgggaagactctatttatgttaatgatgttaatatcgattcacaggcatatctactccgagttttagggggagttttcatgtgggcatacctccgccgcgtaccatccaaacgcctatccattgtagtgttagccagcggaatgttgctcggagagtctctcggcagccttggagagcttgttttattctcagtgaatgctcctcatctcgggtgattgtgggagtttgtgacttggcgcagaaatgtgcatacatatcacaatgtagctataaaataggggattgttacgcctatgtacctgcaatttgtatataaaccactaacaacattaagtcacttttatcacaacaactacttcatcgtcgacaactactttaataactacttcaacaacagctccaacaactgcctcaacaactggtctatcataatcaagggattaaaacagagataagtctggcagaattgaatgggtgccttctatgtaaggcgaggtagggtggttgagttatatccccgaggtcctccttccaaggttaagcttcacctcctcctaacctttagggtgggcgtaccatccacgtgatcacatagctaccttagtcccgctgctgtatacatcatcattcttcccctgagctactggccaggctctaaggaacatgccaaaatggccgcacaccatcaatcttctttggaagatgtattatggaagtgaatcctaccaggttatccaagtgatgccaccggatatcgtcgcggatgatttcgtgctgctctcacttccgcccggtggaaacccaataccatatgtgtactggaacattggcgtgacagagccagagatgtgggagaaggcaaataaagaaggcaagttgcgagatttacctccaacccacagtgctctctatgcgccagcaattgagccaatccttcaaaccggaatcgaaggattggctttgtctgccttgacattccttgagattatttgatgacatgcagcacattacgccggtgaagcaaaaagtacatggcatttagcatgagcagagagaagaatttaggatattatatgttcatattttgtcccagggccttctagtgtgattcgtagaattcatctttcctattccgtatatgcctgataacacatcaaaacacatcagaactagagtaatacccatttaataatgctgttcagcgtttcaattcttaatatacatcggaagaattttttttatattaatctccagccttatacttcgtccccacaccgctgggaagctctattagctataatcctaagccagccgcttgatatgaactgcccaatacgttagacttcaataccgttagcactagaatcctgacagaagctgacgagttgagctaaagaccacagagatggtaaagcttagtgttctgcattaatagaaaaaggccccatcggcagagcacagacagagcacagacaaagacagggcgaacggagaagcgggttaacgaaaaagggagaagtcatagggcgacgaggactttatagaaataggcacggggaaggctatgggcgctacaccgcatcgtgcaattcaccgtcaccagagactacgtagcattcactcattggagttggcagtaaggcagcccttaagcatcaaaagggcacgcgctcccttgaaaggcactaactaagtggagtatttctagacagtttcggcccctggactagatagtatagacatatgctgagctacaacaataccccgtacactctaaagattgatggctgtatcacagcagggcacgagagcttgctgtagaacaataacatctgagcgtagccttttgccacatcgaccgtcctgcagctgccaggtacgcgggaggagtgtcttccgaccagtccgaccacggcgctaactgcgcccaggcaccagctaaacacctcccctgctcaggactgattttatatgttgtacggagtatagtctagaggagtcatagtaacgtggcgaagagatgggtctaagaaacaagaaacgagaaacattcttcgtacaagttaggagggcaatcttccgccatgtcatgagtccatcgccaaaagggggttagtgtgaccctcccgcttccgtcatcgtctctccagcctccactcccccatctaccatctcatctacccttatctcctccttccttcccatcttcaagtcattctcttctttgcatccaacatctacagctttcttttctcatcttgaatgatgaagtcattcactatcctagcagcttcggcgttgctgggcagtgctgccgccgaggttcacaagctcaagctcaacaaggtccctctgtcggagcaactggtacgatcatcccatcatccctattgccttcacaataccctggaagctgatcgattgataggacacacacaacatcgatgctcatatgcacaacttgggccagaagtacatgggaattcgtcccgagaagcaccaggacctgttccatgacacttccctgaaccctgccagtggccacaacgtgctggttgacaacttcctgaatgctcagtgtacgatagtaccaccaaaatttaggtcctgaatgatgacgctgacctttccagacttctccgagatcacgatcggtactcctccccagaccttcaaggttgtgcttgacaccggtagctccaacctgtgggtcccttcttcgcagtgcagctctatcgcctgcttccttcatagcaagtatgactcgtcttcttcgagcacctatcagaagaatggctccgagttcgagattcgctatggatctggcagcctgagcggcttcgtgtctaaggacaccctccagattggtgacttgaagatcgagggacaggacttcgccgaagctaccaatgagcctggtctggcttttgccttcggtcgctttgatggtattcttggcctcggctatgataccatttccgtcaacaagatggtccctcccttctaccacatgatcaaccagaagctggttgatgagcctgtgtttgctttctaccttggcgatgccgacaaggatggtgacaactccgaggctacttttggtggtatcgacgagagccactacactggcgagctgatcaagatccctcttcgtcgcaaggcgtactgggaggtcgagctcaactccattgcccttggcgataacgttgctgaacttgagaacaccggtgtcattctggacactggtacctctctcattgccctgccctccaccatggccgagcttctgtaagttggattctcgcttgccttcgtaatgtaatctgtttgctgacctattccacaggaacaaggagatcggtgccaccaagggctttactggtcagtacagtgtcgagtgcgacaagcgggactcgttgcccgacctcaccttcactctgggcggccacaagttcactattggcccccacgactacatcctggaggtccagggctcctgcatcagcagcttcatgggcatggacttccccgagcctgtgggtccccttgctattttgggcgatgccttcctgcgccgctggtacagtgtctatgatgtcggtaacaacgccgtcggtctggccaaggccaaataaatgcccgacggccggtgagctgtgaatatcagagaaccaggtgacacaaggagattgcttcgtatatacatgtcgcttctgagttgaacgtatggtttcatagcgcacttcattcgcctattgctaagtagcatgttgattagggtttttgtttttgatcgctggcacagccccttcgttaaggcctgtcgctcattggtactgcaaatggatatctttattggttaagatctacttattgcatctcattcttctatcgaagagtcttccctcgtagtggccttggttcagctggatccctcgataaattcctagatgtaagaacttgagttggcaattggttggagctaatgctggttaagcatcaatccacagtcaaatttctaatacgtacagtcggagaaaattagtagtatgtcactacgacttagaatatgaataaaaatatgtcgagggctatttgatcaagccatcatatcataccattcagaaaaataagatacttggactaaagtagatcgcgcgccaattaatacgaggaggtaccggctttcaagtactggtatgacataagcggaagtagctctcaacctggatcgagtgagtccccgcacaacttcaatgagcttcccttttctttgatcgaagtccacattcctccttcaatcttctccgccctttcaaattcaagcgacttaattcgcctggtgtgtgatttgcctcggacctccgcgccaggttgtgctaggcgcacggttttcttttcccatccgcgcttggagtggcgattctcattgcgctgccgaaaccaccattcacatctatttattcctctgatcgatcttggaatactgagtcataggctggaataccatcatcggaacccgatattatccagctcaacacgcgttgcgtgtcggtgatggcgtcgtagccggaaccgcacgcgatcactccattcggcccacacgtccttgacgcgcgctgtcaacataacaaggacacagaatacattttggggaactgagcattagtacattacatcgcctgggggcgaacgaagagcaacgatgcttctccgtctgcccaccggcctacattacccgatcaccgtgacgtcgctgctcaaacagcctggcgacacgattgagaaggatggggctttgttttggtatacttaccagactaccgtcaccgagggtgatggactgggcaacaacatcgaggtgaaacgtaggttcccggctagatttgaatcgactattgatggagagatcgttaaatggcaaatccaaaagggagacgttattgatgaaccgtgagtataccgacccttgtcttttgctatccttttctaatttgttgctagggtcaatgttgtcgaaatcgatgagccttgcgcgcacgagattcagtttggaggactttgtgccgagtgcgggaaggacatgactgagtatgtataagcctttcagcgggaattgagcttttctaacctgtctcgtgaacagatctacgtacaataccgaaatcacagattccatgcgcgctccaatctccatggctcatgataacctcacacttacggtcagcaaaggggaagcagctcgagtcgaagaagatgcgaaacgccggttacttgcatcgaggcgtttgaccttggtggtggatcttgatcaaactattatccatgccactgttgatccgacagtgggggaatggagagaagataagcaaaatccgaaccacgaagctgtgcgggatgtgcgacaatttcaattgatcgacgatggacctgggatgcgtggatgctggtattacatcaagctgcggccaggactagaggagttcctgcaaaatgtggctgagatttatgagctgcacatctacactatgggtactcgtgcttatgcccaacatattgttgatatcattgatcccacccgcaagctcttcggagatcgaattcttagtcgagacgagagcggaagtttgacggttaaggacctgcaacggctgttcccagtggacacaaagatggtggtaatcattgatgatcgtggtgatatctggcggtggagtcccaatcttatcaaggtctcaccttatgactttttcgtcggaattggtgatatcaattctagtttcctcccaaagaaggaagatattggagcgaacaagcctcagatcgaagcgaaggcaccggagcagaccaatgaacaccacgtcaatggcaaaacgcaagaaggggcccaggtatcagcattagaacagctggtgaccatgggtggtggagacagcccaaggctcctccaggaacagaccgatgcacaagaagagacaatattgcatcaggtggaggatcgacctttgttacagaagcaaaaggaattggaggcagaggataatcttgctgaaaccaatgaagtatcgtctagcattgaagaaacccacgaatctgcgaaaccccgacatcacctactcgaggaccatgaccaagaactcttccagctgcaaaaccgactcgaacaagtacattctcaattctatgatgaatatgacaagaggcggactctcgcccttgggggtcgggtggctgctctagggggtcgggtagctgctttaaggggagagaaggtttactcaagagacaaagacgtggatcttaaattggtccccgatgtcaaagacatcatgccgcagatcaaacggcggatccttggaggggtggtgcttgtattttcaggtgtccttcctctgggcatagacttccagaatgcagatatctcgctatgggcgaagagctttggtgtgacgatctcgtcaagggtgaatgcccgcacaactcatctcgtggctggccgcaatcgcaccgctaaggtgagagaagctactcgctatcccaacatcaagatcgtgacgacacaatggcttgtcgacgcgttggttcagtggagacatgttgacgaagaaccttatctcctcccacttcacccagacgaccgaggcgaacccctgactccgagtgagctcgagcttgaaacatccatgctctcgtccacagacgaggatgtgacagggccccaatggacacaagaagatgacgctgaagacatcttcaagtcattcggcttggacgacacatcgccgatcgggtatgatgcggacgagcaagccgctgtacacgatgaactcaaggactttttgggcagcgatgacgaaagtgaaagtgacaacgaatccttattagacgaaccatccataggaggcaagaagcgtaaacgcaacgaagacactgaaagcggcaccgacgaagaagagtctggagacgacgacggagatgaccatgacaaacaaggctcccggctctcccaacgcatcaaacgctcctatgagcgcaacaccaagctgcgagaaattacatcggctcctgccaccggtagtgaccaggcttccccagaccgcccccaaacatcggctgtggagggggagtctgactctgagacaccgggaactagcagcgctcccaaggccgactatcccgacccagatgacgatgacgacgagctggaacgggagatgcttgctgcatttgagggcggagggtatgaccctcatgcagaggcagatcctgcagctgaggacggatagagcactcggttgattttgtgcattcgtttcggattctctttcttcttgtcataaccggagggtgtgcggttgcaatgcgctcttggcatagcgacggcgtttattaggtctatttgactttgcgtgtcttcttatctgtagttctcgggaatttgtgtatctgaggatcgatgtacaattcagttcaatatactgggattatgtctgcactatggagtactaaaacgatatgtctatatatgtagattgaaatatctcgtttgtatcctttcagaaccaaatcttatgcacaccaaaaagaaccaatgctatgtcgcttccattcaacgccacagatgcaaaaaggtggtatcacaacaaaaacaaaaaccaatgaaatcaatcataaacatcccgattcacctgccacgacataatcatcatccaaagatagaaaatcgtgttcacaagctcgagcgcaaaggcagttctccagcaattgcctataaagtcagtatacaaaacatacaaaagagggcatagaagagaactcacaaatagtactctgcgtcaaccaagccaaggtgttgatattattcccccaagccttattgttcgtcacgtagatttggcaattatcattcacattcccgacaacgccatacagctgcagcgaagtctcaatcagacccgtcagccacagcacaaagagaataaagctgccgatgatgataatgcccggtaagaggaagtggcgcgctgcaaggatcataattaggaatatgaagcacacgccgagtgcgctgctgacgaccatgtaagggaagagcctggagatgttagtatagatcctgtattgactatgacatgtgggaagaatgtggggggtaggttatgagtatgcacgtagccacacggataatggataatatagagataaatatagatcacttaccatggcgtcccaagatgcatttgtgattgcacggtcatgaaccacgagaatatccccagacatgtcgctgcgcacgatagcacaaccataatccagatgttgagttggagttcgggccagtggtagcggcggcgcatttcgcgacgcctgcggactgccattggattgcttgtgggatgtagatagagggtttgaggtgtgtgttggattgcgatgggtgatggagctcgactgcgattgtggagtggagtggagtgtgtgctttatactggtgctgttgtatactgcccgacgcaggcttggatgccctatattttgttgcgggcttgggatcggatggccagatcgggagtcaagtgagtcaagtgaatcgagtctgaagggattggtagaatcctattgtttcaggtgaggcgcggtgactgggacaacgcattgggcgcccttgagcgctcgaggccctggggattttggagtcggtgcggtgtggatatatttacaatcgtgcatgaatttctaaacgaaagaaaaggccaagatatacagagtaaagaagaaaaattaagcaaaagaaaacaaaatggccggggagggggaaatttaggaaaatggggtggcaggggatttagtgtcgttccctcggactggcagcaattctttgatctattttggactgaatcctctaaatctcaattaatatcctcttttaatccctttatcaaatcgtctttatagaagagtgtcacccaatgcactacgcaccagcgaacaccctgctcgaatggtctccgacgcacccttggactccaggctggggttcacctcgaccaagtccatcgcaatcagattcccggtctcatgcacagcctcacagatgaagtctccctcacgcaacgtcagcccaccacggactggtgtaccggtactaggagcccactgcggatccaacgcatcgacatcgaaggacaagtgaatgggagtgtcgttaccgatgtgagcgagagccatttcgacaacgcgaccgatgccatgactagcggaggaagaggtcagcacgaagatcaccaccacagcccagggaaaacaaaacagaaaacataccggtcgatatcgtgcatactgaatgccttgataccattctcccgcaagagcttcttctccccgcggtcgacatcgcgcaacccgatatagacgagcttctgcgtgctcacgatgtgctcgtcctgcatccagccaaagatatccttcttgtcctcccgggccagccgagtcaggaacgccatcggcatcccgtggatgtttccgctttcgctcgtttcgggaatgttgatatcggcgtgggcgtcgacccagatgacggccatttcgcggcccagtcgctcgcggattgcctttgctgtgccggagacggtgccgatggcgatggagtggtcgccgccgagagtgagtacgaatttcccgtccttggcgtagtcgtagacctgtgagctgagcttctcggtgacggcgctgacggcgcgtggcttcttcatgcctcggtggtcggggtcttcggcggggatgtcattttcgtagtagtggactttgctgtcgtggtggacttcgtagtcgaggtcttcgctgagttgggttaggaggcctgattcgatgagggccatcggtgctgcttcgacgcccttcttgcactgttggggtttagtatgagttcatgagctatagctgtagttccaccgggtgtcttacctggccgccattgaaaccaacggcaacaacgccgagctggttcgggtgtgagaggaacctcgaggtaatggttgaaggttgtgtcattttggagaaagcagggagattggaagaggagtcaagaagaaagagagctgttcaggtgttgcgatcttgaagatctcgataagaattaaaatgtgggggctctcgataagaatatctgaagaatcgtcaggatagtcaggctgatgtcgatttgtgaaagaaacagaggataactcttcctttaaatatctcggacttgtcttacaacgtttctcacatggccccgacttcaaccgggtcggtgtttcattccttgcgcgatgcccgcgaagtcgctaaaaactgcttttagcgatcacagcgactccgccggatctccatcacttccgttaagtacaggttgaggagagcgcacccctttagggccattcggtgtcccacaagcctgggtttgacctcttacagcgagagataggccggcaattctgtcatttcatttccgggctttgatccaagcgcgtggggtggtatcggaggtccgggagcctacagggaagagaataatcgcaaggccaccgtctcggccacggtcatgagggtatcattgatgccatagaatacattccatactatactatacaagctatctcaggatcaactctcggagaacctcttctgccttgagtgcctccacccggcctttctcaccattgcgcatcatttgccccacaaaccaacccagtttacccagctgcttcttgctacggatctgctcgaccatctgcgggttcagcgcaatgaccgactccgccagagctaggtactcctcccgcgacaacggccgcagtaggagattctcctcctccagtagttgcggcactggccgttggtccccgtcaaagatggtggtcagcactagtttggctgtcgggccggtgatgagtttccgctgcagatggtcgatgagatgcgccaaggaccgggctgggacggtctccgcgtcccatgcctgatctgccttagccaggagagcgcctagctcgtgcaagacccagttgctcgccactcgcgtgagaccggcgcgcgttttgtcgtcttgatctacttgaagagtgcggaggatatccaccacatcgtggtagtactcgagacgggctccgttgtccagctcgatgagtggtttggcatcttcgattggcagattaaactcggatccaacgagcagtgtaagaacagtgtctggtgctgtcggaatagacgctcggagactagagagcaggtcctctccaatgaccagtggtggaatatcaggatcaggcatgtagcggtagtcgaccgagccctctttgccgcgaagtctgcgagtttccgtgctgccgatcgtccacccacgtgtctctccttctacaacaccgccactctcgagcacctcgatctgtcgattcttctcggcaatgatggcatcctctaccgccttgaagctgctgaggttcttaatttcggtacgctgacccagcccgctgattccatcgtactgatattgtcccggtgcttcgcctcggcgtcggaccgagacgttgacatctgcgcggagaccgcccatttccatgcccgtagtcacggcaccacaagatagtagaatggcttgcagcttccgcacgcatgctgcggccgttgcaggagtgtggatttgtggcatggtgatgatttcgaccagaggatgggacacacggttgaagtcgagaagttgtcttgagccccggtattcctgggatttggctgtgtcttgctccaactggagttgcttgatgtcaatacgaatccgttcaccgtcctccggggcgattccatcgtaatcgaataggtcaacgtagccatttcgggcgaatggttctagagcacgtaagtatattccgcgggttgaaggacaataacttaccatagtattgtgtgatttgataccccgccggctgatcctggtagaagtaatgtttccgatcaaaccgactcactcgctgtatctcacaattcagtgcaatggcagcgcggagagctggtaagagagtcgcgatttggaatgcctgtctcagatcagccctgtcgcgattccacagcattgtacacgataacactaaccggctggctacccgggaaggccagatcgaacaacgcaacgttggaattggggatatcgcttatcgaagttgccgcccctattcaattgatgagacgccgactcgtagtctccgaggtaaaaggcgtactcacgagaaaacaatttggtctctgtatccaattgcgcgtggatctccacgcccactgtcagttcccattcttccctcgatgcctcctctgtttccttgcgttgtcttttgtgtgatctgagcgctttggcttcctccttgagttgtttgcggaggggaacgcgatcggcggaggctggcggttggagatagcgggttggcgcggaggagaattgggctttagtggatgaaagggctgaccgagtcaagcgacggacgcacagagagcggagcgtaccgccaccaatacatgaccgaagcatagagatattggactcgtgttgagtgttgagtcttgaaagacgtgaatttgcgggagaagctcgggacttggcgatctgcagatcattggacttcagtctaaagagacatattcttttaaacaaaccctttcgaatatcatttttgtacacttacaatgctgtgagaaaaagaggatattattataaagttcttttaacactagcagagttgtattcagtcaaaaattcgaggtgttatacaccttattcacccgcggagtgtagcaacgctcttgatttcgtataaaatcaagtattaatatgttataagacagtctaaacatcataaagagagaaaatagacctttcctaccaagacagcgaaacctgatacttcttctagtgctctatagtgtcagtcttaagacttcaatcccgcctgacaatccatgcatgctcaggatcgtatgatgaagctcggcagatagctgaagtcaaaagaagaacagggtgctaatataatacttgttgcctgttaagtgagcctgttctaggttggatttgatctctcgaactatataaccttctcggaggagcagcgattggctcagtcgccacagtaaatgttttccatcggctcgaaatgcggggattaagtctccacaccagctagaaagaggcattggaacgaaatatcagaagtagaagactatcccaagggatagaaatagctatacgcaatcagtgacataattgatataaccttctacgtcgaaccgtggacgatagctgtctctcagccatgtacctgttgaaaagatacaaatcgactgcatcgagtcgaccgctcttaaattctagctattctatttctactatataaaacatatcgatagagactaatgaatttccatctgccatgttattgtagaagatacacacagcaacaattcctagccaatcgccctcaaggcagctagaacagaatcaaaaacagtacgaatatcaaaaagcttccgtttactcaagtcgagggaataaaaacgccagacaccctccagttccacactggatcgcaattgaaaggctccaaaaatcccacattcaacgccagactgacagacctgctgcccggattacctccacataaaaaaagtcgttatcacataacatcagcacgtgttaaactcacacattgatcaaatcatcaaatgtatcctccgccgagaacgaataagacccctcagagacgagcgaagcctccgactcccggcgcatctgctgctcaaacgcctcagccgccgccgccgcagcgggctcaagctgtagaggatcatcaaagccaaaagacatggccgtcggcgccggcgcagacacagccaccgccgccgtagccggagcttgcgtgtgttcgaggggagaaactgagacagaggggttatctattctggcgggcgattccggtagccccgcaggcgcagcgccatctttatcggtaatcttcttgaccatctgggcgaggtgaagtttaatgggctcgtccccacactgagcatgtttcagcacctcgttcttcagccccaggatctccgagcgcagccgggcaatctccgcaaccagctgctccttcttctcggactgttccttgaagttgaattccagctgctgggtgtgttccttctttttctggcgacacttgcttgcagcgagacggttgcgctcgaggaacttggcccgcttggcgcgttcgtgtggggcttcgtcgaagtccgggctgaggctggcggtggtcttgtattcgcgtaggcgccggtgtttgctcacgctttccatcatgtctagcgtgaggtcccggccttggtcatcgtatgggggcggggttggctggccattccggacctgggcgtttttgaggtcccgctcgagtgccgaatgggcaaatgctgccgagtcggccttatcccacccggtggccattggtgaaactggactcagaccccagagttggtcgtcgtctggaataggaagacctaggaaatcgcctgagaaggagcttgtgaatggtgatggatcgatgagattggttgcaaggccaggtaaccctgatggtagccctgatggcattgcagatttgaggttagacatgtcaaggcaaggaagctttagagcgaaagttatgttccttctaaaacatggaagggagagaaagcaagagagcacactaaggaagctaagacaggctctcttgccctaataaccctaaacagtcaaagtctgtctttcccttggaagcaggaatgtggacggtgcctgaagaatcgcagagagtccaggtgcagtcgacctggttggagccacggtcggacaagacttcctgcggtccagaagatccgagcgaatggcaccggatgagatgatattcgggtgtcaccaaagaaaaagaaaggtagaagaggaatgtcaaaggataaaggaatgtatgaatgtatttttatcgcggtcgtgccctggcctactaggtaaaccccttcaaccctaggatgcctatcaaaacataaaacaacaaaaacaaggtaagagatagaagtgaagaaaagaacggtatccaacgggattcaaagccggccagcgaaaaacagggttggggaatatcccaacctcagtatacaagtaacaagttcaactcttttagaaatccaatcagagaaacttctggtgtctcatatgaaacatccacaacctggaatctctttgtccgattattccctgcccaccacgtatcgttctttcgtccagtgttgcagctgtcggtggataaagtgccaattattgagcaatagccccgccacgcgttgttcctcaatctccctttccactgctgagattccttcgtcgttggcttgccccctggcccctaggaggagcggtccaaacacccgcgccaactcgtggaagttgggactcgccactggatcacggagctccatcccggggtcctgggcgtcggtctccacattcaccaacaaggaaagaagcccaaataccgcacagataaggtcgagctgcatctcaggcgcaagggcgatgagcgcaagacagataagctgcactcgggcggcggtcgttgggcttgcctcagagatacaatctggcacacggagcagatgggatggattgggggtccagtgatagtacatcgccctcaggattcggtagagccggacactcccgaggatcccgtttggaagccccgccagcacggcccttaacgcccaggcgacactcaggacgggcgctgagtcctcacggagctggggcatggcaactacacgcatcgtgagggaaatcttagattcatctttctctgcctctagcacctggctagcaaagtgctcatacaagcgaatggcgactttcagatcgccgggctggacgaagatctcgggagtgttaagacctgcaggaaccgagtcagttcagtcgtgacgtagaagaagcagccaccaaccatatttgtgcagaaacatcagcgttgccacaatgtatgcggggagctgcacgggacagggggctaattccgtcagcataagatagccatgtcctccaagacgggccaaagtctgaatcgatcttccttgcaacgaagtcatcgtactggggcgacgaatattcgccaatgttttcattcgtcgcagtttaggagctggtaccaagggagttgtatcgacatccaaactggatcgcaccttgcgaactctgcccaacaatccaaatccacgacgactcgtggcttgttcgggattgcgctctgatgctataatctagtcagtggcaacccaggcccaaacaaagacaaaacgtacgtgggcttggagtatcattaaatggaatggcaagcgagatcccaaactgagctgccatcttgttgtaggccgcgatagccttgggcgagtcaagtgtgctactccaactaattcgacttgtttggctgttggccgaacttccccccggacgttcgatgaccgattcaattgtgtcgaaatcagtctcggcgataggctccagcgtcgcttcagaagccctggatgattcctcgcggctcgtacctgcactatgcctcgaactcgattttccttgtttaacgtcggtcgccttcccatctgagaacgggtccgaaccctcgtgagtatgctttttggtattgctgctactatcgtcagggtaatacagcatcagtcccggccatccccattcccccaaaggcccctgagttggcatcccgaggtgctgggcaggggtttgggagacagtagcctcggtttgactggactcctgagaatgagtcgtttgagtgctgaccttccgcccctctttcgggttatcgaacctgacagacttgccagctgtggatgattccccggcagcagtatcttgcccaacggggttggaagtcaacggtttggagctcgacctccctttgcgggcaccctcctgtgcagcttcaagctgtgtgtccgtgatggggtcatcttcctgggatagactgctgcgcaagcgagtaaccattctcttcagacgcttggtgccattcttggaccgagtaagttcgcccgtatcttgggtgtgctgaacagtcgactcagtttcggcattgtcaacgggggttgctacagccgagctaggtgccttgttcgcatcgctgggtcctgcttctgctgtcgggtcctcatcgcattgtatctcattcgaggcggcttcgggctgatgcttcaatgggtcttcctcagacgttggacgtcgtcgtggccagacagtacgagatgcagcagggttagatggctcagtcttggaccggaatacagttttgagacgccgcatgattatatttggataatgtatacgagaggaagagatggtgatgaagtagagctagaacaggggcgccgggttgtgacttggacaaggtcctgccctcgaggaaggagctgagatacatgaggaagtcacgttctaccttctatagtcctggaagaacaataattaagataatgcttaagcatcattgacattcaaatcttccgagtctattctgtgccagtgctcgtaaaaaacaaaagagagcaccggttttggaaaccatgtcattacctctgtacattcgtaaagcccaaaattaaaaaaaaataggaatagtcatgacctgggtccatatgctctcgggcatttcatatgttatcttcgtctttcgaggtctcgaagagccacaggacagatcaaaacgccggaaccatgcaaaactgaatatgtatggggaaattattttctcgaactcgatcatgcttcctcattctctccctcgagaagaatgtagtgcaggatatcactcagagtcaaaacgcccttgagcttgaagtgctcatccacgacgacgagacggtgcactcgagatttgcggatagtatcaaagatagtatccagtccatcattcaatgaacatgtgtagatacccgggaaaccctgcgcagaacatcagtatcagaacgatatcactaggaacggaggttcatttaccggcgaacgtttcttcaatgcttccccaaccgtgagactcaagtcatcgtagaaaccacccttgatcaaagtaatgacatcgaccgactcgaatacattatacaccacaccttccgagttcacgatcggtacactggatatgctgcgctcgaccaaaatatggatgacatcaataaccggggtatccatcgaagccgtggcgacgttatcatacgatccaagcaagagctcgcccagcggacgacggagctgctgcgtatcggggacattgacggcaacgaatttcaagatacggtattgcgtgatgacgctgagaacgtggggccgctcggtctggctatcgctggtgacgagggggatacggcgggcgcgcgattccaacatgcgccgacaggcatcgtagagagggcgctcggggtcgatggagacggtctctggcggcgcgacgcctagcgctttttcaacctctgtatattcccgttagctgcggggtgtacctgcagagatggggcgacacgatccaacgcacctcgcaaactgtccaggcggaattgatcgatctgatccagcgccgcggggttttggaaatagtattggatgacattgatatagtcggaagtggtcagaagacctgcgaatttggacgctttggagtcccacaacggagctgaaacgatgcctgtacctcccgatttccgggctcacgatcagcttgagttcaataattttgtagagaaggagggggaatcgcgacaaacataccgttttgaatcagaatgttcagactctccttgacggaaagcgacgtatcgaagatgatgagtcggaagctgagcggcaggacatcgtaggagtttcgggccttaaggaaatcgcgaatggcacgctattttctgcgttagtcaagatctggatattcccaggtgatctaatctggtgactggtgaacccatgccgaaacacgttcacaatgtccgatccccatgtccaacgtcaggtataaagaggggttgtctccccttgaaaaagcaaaaacggacaagacttacaaggccctgtcgctcttcccgatcgatcgctcgctcggaggccattggggggcgtaggtacgaggatgggctgcacgaaaggcgcgtgaccagaggaaggtcccgagtcgagggtcttccgcctttcgatatgtggggggttgagggatcctacgcaacccagattgaaatttattcgagagattaaaggagattaatggaatactttccgattttcttccctattttcagagattatcacattcagttaattatttcctgcgaatgagggggctgcaagtacgcggactatacgggaataccaaatgatccttgttcaacgatgtaagttgtatacgacatggataacctggcgacaactgacacctagttcctcaggcatatccccagattccgtctacgaaaatcttccatctggactaggacgtggggcagccaccgacttccggatacagagcacaatgtccgagaacatttcctcatcagggccaaactcatgctgctcataaccctccagcattgctctgactcgcggagaatcaggatcagtcctaatgaaaatattagcagactgaacagagggtagaacatgacctgacactcacagcccccgaacaagtccatcgttgtcccccactcgaccccaaataataaccgcaggccgagcaatgtccgtaataatctccttgacaggcacattcggtgctatcgagagtatgatcgagtgctcgtccacctcgagccaaccacgcggatcttcaattacctcgatgccggcctcgtccagaatcttcgtgtctacctcggtgtagtccgggtcctgtgcgtagcatacgactttctctttgttgtctctttcttttagccactccataatggtaacgaagagcgcatgctgagacgcagatcgccacccattcctggtatacagactgccatccgcattgaaacattggaaggacatcgcgcccagagcgaaaccgacgaccttgtcaatttcatgattctttgcagaagataacaggattgtcttgagtttttcgcaggctagactctccttccattcctcggccttgtcttggaatatctttgtgaccacttcacggtccaggggaccacgccgcgggatgattttctcggtcttactatcccattcgtgtgtccgatgcatgacactgactgagcaaggctcccaatgcgacaacgggtaatctcttcggttgatctcgttcctgagagatgctcgacaccggtaagaaaggaccagttccttgctggatgatgttagttctcgccataatgtgaggctattagacatgtactcaccacacaaattccaatgccagatcgtcctcccaccattgccgaacctttcccgtctcgacgtcgcactcaacaaccgcgccggttatgtctttggtaagtatcttatcgccttcgactgggtctcgcttgatgtgatcccacatatcttgaatgatctctttggtgaaaaatggcaccccggatgcgtagagtctatcgataattgcctttgcttcctccagggttggcacctccccaggttcaaccaagtaacaatgtgtgagtttgtagtcaagatctaaccgcgagattttttctccatcgacaggctccagattgtttacgtcgctcatgttggcgatctggatagaataggtttgagtatgaacaggaaaaggaaaaggaaaaaaagggaataatttattttggggccgtatgtatctatatacgagcattgctattgcggccggcgcgtaactgcgcattcatcatgcacctacatatcacatgagcggggtacaatcaatggtaatcataatatctactgatagctgagtggagagaaagcggctataggacgaaagaaatgatatgtttcgatactcccaacctgcctaagatatccaaagaggcccctatcccgacctcatggctgtgacaacatccttccggataaaaaccatagcacccctgaactttccgtcagacacgagtttcggatcgagtctatgatcctcgtactcctccatcattttcgtgatgcggggggtcgagtcagggtcaatcctagcgagcattcatgttagctttgggatcaaatctcatagcacatattagaaagtccaattaatcactcacacagtgcccttcgtttgtccaaagcgaagccagatcaccatggcaggtctagcgatatccacgatgatacttttgacaggtatgttgggtgctatggacagcacaatcgaccggtcatcaaccttgagaaagccatccggatcgtcaaccacctggatgccgacaccgttgaggacttccctatcgacaagtgtgtactccggatcctgcacgtagcaagagagctccttctcacccggccgcttctttctcagccagtcctttgcggtaagcagcaacgcgtgctggaaggcagagttgggtctgcctagccgggacaggctaccgcaagcaatcccgacgatgttgttgattttgtcagctctggttgttgacaaaagcacttcaagagtcctgtgggcctcacttgtttcccaggcccgtctctccttctcgaaggtaacacccgcatgcttgctactccatatttcttcctttgtaccgaacggatatacctcatgcgtcagtcgcaggggaatgagctccgaaattggaatgtcaatgccatccggatatctcattatgtccgctatgagccttcctgcatgattgtagtcgatggcaaggtccaagctagatgtgtcagctctcattgaaacaaatctgccagtagctaaatcaagcgtgagttgagtaacttactagatatattcccgttcaacgggatttgcgaaggttgtcgagaagaaatgatgtcccaagttcactgtgccctcgaaaacagcgccggtgaggcccctcacggtgactttgtctcccatggtacgtcggctcttcagctgctccccgagatcttggagcgcctttttggtgaaaattggccggccggcttcgtaccattgattgacaaagtctatcgcctgcttctttgtcatcgtcagctgttgacgagtcgaagtgttcgatgagtctgtgtccggctggggtttccagtgcaaagactctgagcgcactgcagtcatgatgataggagtcgaagtcttgcagaactgagaagctgggttgaatatcaagaatcttctgagggttgtagcttcatattaatacatcttggaggacattgctcaaaaagcctacgctgcgaacatgtagtagaagacagtataccacatcttctaccacattcgcgtgacacgttaacatccactaggcgagcacagtctgtgtccaattgtttcagctacttctgtttcctgtgttggttggacgatagattgtgggatatgacttgaattgaaaatcggtagaagggagaaagcgctctcagacaagaaacagaacagatatagccccatttaagccataaatagagatcatggttcttattgtggcgtagtgttagtacgctatattattttccacaagcgcttaatccgaggacctgcaagaaaatagaagtcagacatgactcaaagttcttaaccatctgaatattccccatggtagcctgacagacaacattttgccctgtaccaggaggattagacaactgggaatctcaggagtcggcgcgtaccacccgtcatgcgcccaggaatatagtatagtacaagagatatagaaggagtcagcggatgcgaatgaagaatgtgggaaagagccatccatcgcttttttatcttatattaatcaaagccatatatattatatacatggccattcactgcaaaggcaacatgaactatctgacaacgtgttgacatgcaagaactattgtactataggcttcggcggactttcaattaatctgttagatgatgtatattaaattttcattgaaagaagttgtttgtgccgagagaaggaattagggcgaagagtgacaatcaatagtaaccagtaaccatctacctatttataggcctgcaggggtatgaatcccgaagtagcaggctagcgacgtacgagaacaagagctgaaggaaggcaaccgtgctgttggtagagcaaagcgccaggaaaccgaatgaaatcatggctatcatatgatatggctctaaagataaatatgagaggcaaaaaacccccaaacccaaccggtaacgccgtcgcacccatgcaaggtatcatcgcaaagcacattttgtccaaattctagaccagccagaacctgatctcttgggaggtaaatacatgagagaactgtaagagacgcgaagctcgacgaatctcaacgagaactgaatatccgtagccgggcctagaggtgcccgtgtaacttgaatcggtagatgcaggtgtggtttgcaccccaatttgaagtcactcggaaaacaaccttgtccacacggatggttgacacgtcgacaatggtgttcagcttgaatgcttgcgcgtagtctgggccgtggaggtcgtattccactttcccgatgcggtagaagttggggccgagaattgggtcatccgagtaagcgctagggggctcaaaggggttgctccgacgcaatagatccattaccagcccgtgaagtgagccaattccagggattaggaatcctccaagtcccgtttcacgggacgaaggggcctgggtgaacggtggcggttgtgacactgtggcatctccgaagactttcaggaagccaacacggccaggtttagcctcgggtgttggtttggctttgattggtattttgtgggggttcactttgaagcgagcccacacctcgattgttcgaggtgccgcctctggttcgagagaagcgcccacgggaatgtgctcaactaccaactcttctgccacgatatcgcggccgagaagtacagatagttgagtcgttccattgcgaggagcactgcaccagcagtcgcctacctcttcccacgtggtaagggcagacatgggggattgtggtgctcgaatggagcgcctggcaacaaacgagctcgcccagaggagtgctcgtaatgatgcgctctgtttgggacccaaagtcggtgaagttttggctgggtcaatcattgcccccaatgccaccgagaggaaatttaccttatagattggcttccgatggaggtttgcatctgtgggcgctgaatcatgaacgttggaaagcgactgttctgatcgaacagaattgatctcattcgacaatgatgacatctgaacgtccaattttgatacctgactccgaaggctatggaaaacttccggtttagatatgtttatgtttgaagaggaatcccaatccagagtaccgtggtccagatattcacgaaactttgcggcgatgaggggcacgaagatgaagctcagaaacaaaagcagatagaacgcagcccgaatccaattttggtagcggccctccattgctgcttcaaatgtctgcgtccagctttttcgttgtgactcgctggggggttcattgcgactctctggctcccgacgactctctggctcccgacgactctctggctcccgacgtcggggtcgcgctgctcctagccatcgacgcaaaacgctttccttggggatgtcgggctcgaaatcttgatatatcgccggttcaaactcggcgtcttcctcatcctcctcgagaacattagccaggccagaaactcttcgaggaggcgccgtgatgttgcgtccatgtttgcttggccgcgttctttgtaggtcatcttcgttaatatcacgttctagattccaagacgcgacagaaacattatcaacggagctgtggcggaatggcgtgctgctgcccgaaggattattaatacgaggagatcccatccgttgaagcggcgatggataaagcggagagtttgacaagtgtcgttgcaatgggggttgagcgtcaggactagagtccgtagagatcgaatgtggaactggaggcgaaggagtcttatcggagtgttcatctactgcattatgcagcgactgctgaagctgggtttggtcgggggttggctcacgctttgactggcgtgcttgaacgccttgtttcttcttcgtagcggctgttcgctttcgagcagtctcaagacgggcatcgactaccccagctatctgatctatccccatgttgggtcggatcgacatgcgctgaggtaatgctgtggtagtagcagcgccataattgaatgatgcttgaactggaacactgggcaaaacaggcccttgcacaaggtcgagtattgactcaaattcgggttcctgatgtggtcgttgaggagttgcgccagcccggcgtgtagcacgtttgggcggcatctgtgttgttaacccctagggttgattccaaagattatactttgttcttgttttgtatctatttgagatatcagctttggactggacaggtaaagctaaagaacccagacaatgggatggccaatgtatcaattgaagccttgcagatactaaatattgattgaaacacaatatccacacattcatgcacaagacataatgcgacacgaactggaaatgatggcacgcgaatggaacatatgcaagtatggtggaccagggccattaccacaactacagagcaagaaaaagaagtgacaacaatctcagacttaccacagaacagattgaaaatgcgctctgacaggccgtgtgcagatgtccgaagcctgtagatcgcgaccccggagagacgcgcagacgcgacggtaacgtgacttgcagctgccagctatcagcatccgagggtgatgccactcaagaggtcgagaagtgttcgctttatttcaatgagagcgacaatttggtctgaattgccagggatccgatggataactcaggaggttgagtgaagtgaggaaaagtagacgagggaaaagggtggaggcctcttgaagatcactgaagaatctcaaatctcgactttttgagctgtaattcacatcgaactctgcatggaattacttgttctttatatttttgttgttctttatagaatacagtctcacttccattgtctttgttgttagatctctttgtcaacccttgcgcctcggactgctacgatcttgacactatttttgtttcatttccttacatccctgtttgaaggactttgttcatgttgtatatagaataactaacgtgatgctgctcctgattcgcccggtcgctactaagacatagattgaatactatacaatggacgcaaaaaggctgagctgaaaagaagatgagacccccgtccccccaagtatgcacccctaggaagagatcttacacgtctagcatgtccaggcagccatagtgccatctttacgtccctccacaaggtagccatctttaagacaaacccgctcaacggttgcagggagtggcccgtcgtcatcaagcccaacacctggaccacagtcccagtgcttgccatcggccttgtcatagaccttgaccacaccctccccggcagcggccacgatccgtttggagtcgaacatcatatcggtgatcggcttgtcataagcgtaagcgtcataaatagatcccatgcgtagatcccaaatctgtagataattagaaacaatgggtaagtaggaaagcaaaaactggagtgcgtacccgaatgctgcgatcaagactacccgtgaccagatgcacgtcgtcaaattgaagacatgtgaccggccccgtgtgtccgacgaggctccggtggacatggccactgcgcaaatcccagagacggaccatgccatctgctgtaccgcatgccagcgcggcgtcaaagcactgtactgcgccaataaagtcggccgaagcatcgggcgtgcgacccgatggtcgccagtcagtgtctcccatcatagatgacgatgcttgggcggccgcccacaaaacatccagagtttggacacagcggcctgtgactagatcccattgtctgagcgtcttgtctgcagaacccgagatgagggtgtcacccttgaaatgaagcgctgtcacctcatcgacgtgtgcctccagcgagaatacattgcagtcttcgaggttagaggtcggcggtgccgggaagttgtgttctgcctttccctcttcttggtcacgctcgtgcttgttgaggcgcccgtcccgagtcgtgggccgagcacggctcaggtcccacagcttgacagaggcatccatagaccccgtagcaacaatgttatcttcgacttgcaagcagcgaaccgaggcattgtgtccctccaagaaaccagagcatcggccgacattcatgtcccaaaccctcacggtatcatctagtgcagcactaaccatagtaccaaacggatagtcgaagtcaactgctgtgaccatgtcggtgtgcgcttctatttccttgatcaaagaccctggggcaaagtgttcatgtagaattggcatcgaccgtttccctaaatcagctgtcagttgtgattcgtgtatcagacagaaggattccatacgattacttcgatgtcgtagacttttcggtgaagatgaggggagcttctcgtaaatcgattctgacatgaacgaagcgtccatcgctggatctccggatgacacaatagaaccatcctggccgtctgaccgcggcgtcgctactggtgtgtcctgtgatacctcttctgggaaatcttccagcttattatcgagatcgatcactgttccattttaatcagttttctccgcataatctcgtttgtctcaaaacatcgacccacgttcttgctccaatcccgcttcgtccatttccaagccggccaatcgatcgagaacaatcgtgcggattttgtgcaagttggcgaccttgttatcgatttcgtggatctctgcgctgcacatgtttttccggattcccatcaactccaatttgcgactcagtgatttccgctggtcctttaacccggccgggccggcattcaagctgccgcctctctcggcgtccttgagaagcttccccttggagctccgccttcggtgtcgcttcttctcgggttcatcgggaacggaggcctggaagccttggaaaagggagtaggagctggtgtcttcaggaatgttggcaagaagatcatccgagaggaacgaaagggcacgggactggatctcggtagttgaaagctttgagcggacaaggtcggtcggtgttgtttgtgttagagagaacaccttgcgctgcgtagccggtcgacgcagctcgcggtggatgtcggacatagcattgtgcaagttggtggcattctgttcgcccggtccgatcaggtgtcctgcggtcgtcgtgacttttcgtccgaaggcttcgaggtgacgagtctgcaattaccgcagatgaaatccaatcagtctgtagcttggtgggaggcgtcggagggtgggaaaaagcctaccgttaagccggtgcccaaaaggccatcgccctcgacgatatctgacagacccgacggtgagtcgtcgcgacgctggttctccatgagacggagagtttcttgggctcaaccgaaacccatgcgatatgagaagaggaaagttggaagcttgcggtaggttgaagtaggagacttggtgtcacgcggatttaccgcgttccccgggtactgccgtatggtacttttacaagccaaaaccagttaggtacttatgtaaatctctatgtgtgcggagtatgcgctgtcactttggacttgccctaattcaagtgacttggaacaatatttggtcaaaatgcaaggatgttcaagtgtgttgattctcgattgtggtatttctgcaactgcctcggtcgcatatggtcaaaagtacccaatgcgatagatcactatacactagagcatcgtaagggttctagtgtttgttcaccgttttttctattcagaaattgttgagccctgcatagaagaatgatgtagagctttctgacacagcatatttcttttccaccccctcttctacaacgtataaataggaagacgagcggagtggacttgaagccggaactcacttcgcggtcccacagactctccatctacacatcaccatatatcaagccatggataccgccattgacctttcggatgctctcaaggcattggaccttgctaatattcgtttccagttgatgtgagctctcaccctttccttcagctgcaagactccccatatctttcccccgcccccgccatatccttcaatacacactatagctcgaaacaccacaattccccagactccaccacagtgagagccgctagctaaaagtacagacacgcagtcgactagaagacacaattaccttccatctgatcgaacgggttcaattcccgctgaacaagaccatctacgtccccggcggcgtcaaaatccccaacagcgagctcagtctgctagactacctgctccgcgaacaagagcgcatacagtcccgagttcgccgctaccaatcgcctgacgagtaccccttcttcccggaagtgcttgaagagccaatcctgcagccgctggtatacccgcgcatcctgcacgagaacgatgtctgcgtcaacgacgtgatcaaggagcgatacatcagcgaggtcctaccagcagtgtgccccaagtttggacgggaggaccgtggcgagacacaggagaactacggctccgcggcgacctgcgacgttgcttgtttgcaggcgctatcgcgccgcattcattttggaaagttcgttgccgagtcaaagttccagaaggatcctgagacttttgtgcgtctgatcaaggccgaggaccgggcggggatcgacgctgctattactaattctgctgttgagctcaaggtccttgagcgtttgggcctcaaggcgaagacttatggcactgaccctgctttgcctgatgagaatggtcccaaaattaacattgatgctgtcgttgctatgtacaaggtgcgaaatgacatttggggttttgcttttaggtgtatattcgctgacttctgtgctactttgataggaatgtgtcatcccattgaccaagattgtcgaggtcgagtacctcatgcagcgactcaagggcacacaatgggaataatgagcacctgaacatttatgagaatgacgtggccgatgcaacactgtcctcgggatatacagaaaacaaaaggcaaagcaaaataagctagaactcaatagattttgtcgtaaacaggacatgaaatgcatcagactacaaagtcttaaccttggctacgacatgtattgcgtaagagccttaaccataggctcaaacttggccgcctcaatcaaaatcaagctgcctttcgtccggatacccaactcctggaacgcacgcttcgagtctgcgtgcccttcatcggactgatgggtataatcaatagagccagcacacagcgcatggcgctctataacctcatcttcggggtggaagaagaatcgctcggcctgctcaccacccttcttctttttcttctggggccgcgactcttgctgatcaagctttgactcgacttcctcgtagttcttcgagaggaccagatagtgtgagaatgtgtagggctccttgtcctcaacagcccaggcaatctcctcctggagcatgttgtacatgggagggacaatctcggacggcatgttgatcagccgctcggtcagaatgagaccgataggagggatcggggtttgggaaaggagctgggaagcggcggagagggacgggttggaggcggctttggtcttgaggtagttgatcaggtccttgacgacgggtttatcctgggagcagatagttagtacaacgaagaggcgaagatcgggaagtaacgaaccttgtgttcctgcaggttgataattgacaaaaccgcgtaggggtctgattcatgtccatcaaccttcactgttgatcccagtgttggctgagagagaatcaaatcggccagcgcggacaggtcgaagatctgagcatcgttgtcgaatagttggcgcaagagattcttcaggccgtggaaatcgataggctgggggtcgaaccattcgaaatctacattgaccatgtccatatcctgcagtcgtcatgattgttagcaatccgacggcacacagtccggggttcaagtctgacctcgtcggagtcggactcctctggcttggtgccgcccatggtgacatcaccaggatctttccgcttgaccatattgtgctaattgaggtatttttgtctgggattggtagaatcggagttcaaaagttgatcttggccccgcgttcggtgctgtcgaactttttccttatcggttgttatcgccagcgtaggtcattgttggctgttttccgtcgatggatggatttcaatgttctatattaggctttatatatcatttagggtcttaagacaacttgaaagaagactttaaaaaagatttgttaatttatagggtgtcattgacaagctgtctgggcgtaatggttgatatacttgcacctaagatataccaatacactaccgaaatccagaatataacagcgtccgaagcttcatagaaatgcccatctatatactgtgtggtaaaatacaaaatccaaatatacctgctttttcaagccgagcccccaagtctagacatcatactcaaccgcctcgacagtcggcactttatgaagcttaatatcaaagaactgagcgacaagctgcacacaatcccaaataacctggacctcctccttagggacaccaaggcgcctcgtaccacgaatgtgccaatgagtctccttgggcagattctgaatcatgataccaggcagcacaacaagctcagtatcaacatcatccaagatctgacgatctgacaagaacagcccgtaagtaatctccttggacagccaagaaaagtccttatgcgcactgaacaaatccagcgtgccagtagtgttgcgcgcatacagtttctggagccacccagtgccgcgctcgtggttggcctcgtcgcattgccatccctcgcgagtgaaggtgaaatccttgtcctcgtcgcgctcaacctcggtaatggccaggattgactcaatgggcttgcatactccgataataggcacggctttgacaagcgcctcgcgcagtcggcggatcagggcttgtcgggctgctgaggtcgcatattctgcttgctgggtgaggtggaggtagagctggtctgctcgctctgggtctgggccggcggctagtgtggtaatggctagtatgtaccatttatcgctgcccagactggtagttttgaagcggttctctagctcagtgaaaagttggcggtatccgggttggacttccgctgttgttgccgtggagaaactcatggttgttcttggttggtatggtagaagaattgaaacgattttaggcttcagctgcagaaagttgccggctcggattggtaatcgagagaacatgccaaggtggcgtatattgtatgattacagcgtttaagacaacgtcaagttggtgattccatcaatcgtagtacaccccgatggccgaagtgggtcgcggcaaattcaaagcattttgtatgatatcacaccacttctgtttcctttccagggtagtgatatgctcggctttacgagaaaacatcaagatagattgttcctacgttaattgcttctttagttagctcaggctttaccgcctgctcactgtgatctgctccctgatggttacataagcgtattgtcccgccgacctcggtcccgagatgccgcccaagtgccggcgctggctcgggagcacccgcatccttcccgctcggtacccagcgcaacaatagtacacgatctcttcaggtgtcttgctctataggatattgtctagaatttactttcaacgtacactattgaaaacatatattcttgtctcgtagaagcatgaaactaaatacacattggcaaacatataatatgtggtcatcccatatcgcaacagatacaaatcagactatatgctgccacggacttccaattctcatttatcttcctttgtctcgatgacttccttctcttcctttgtctcgatgccttccttggtctcttcctcgtggaaaaggttgaccttggtagacgcgaacttgcgggcggagaccttttgttcgaacaaagcgtccatctcggcataagtacgacccttgggttctggtaggcggaagaacgaccagatgaaggaggcaaggcataatccaccccagaagaagccggcctttcctctccagttccagccatccacattcagcatatacgggatcaccaccccgttgaagatgctgaagcagttgtacagattgcgggcgagaaccacggtcttgatgcgaagccggattgtaggaatttcggacacgagtgaatagcaaacaggcccggccgaggaatcataaatgaaggtgtagaccaagagcatggagccggtcgcccaggaggtagccgacgttgaaggggcaatcgcgataaatccgattacaaagaggatgacgcaaagaacagccagactgtagacatacaaagttcgtcgaccaagataggacatgagaacccaggagaagagagtgccaaagaaaccgattgcgtattgagccaaggacatgttgaatgactgagagacgggcaatccggctcgctggtagaaaacagtcgagtatgccatcagaccggctccgcagagattctgtgctgcccagatcaaacatgagatctcggtccggcggagattggtaccgcggaaacaatcgaagtagctggtaccttcattcagctgtttctcgacctcgttggtatggatgatcatggctacagtctcctccgcattgaagtcggtgtttcctctagacgttaaccttgtaagagatttgacggcctcctgtagtcggcccttccggacgagccaccaggggctctctggagccatcagaacgccaatgaagatcggaacgggccaaatccactggatggcaaatggaatgcggtaagcccattcgtcatttcgagactccagacccttcaagacgcccgaggcaatcaactgccccattacccagcagaggttgacgtaagttgtgaggtaggcacgtagggcgacagggcagacttcggacgcataagtgacagacagggtctggtagactcccagagggatacccattaggatctcaccgaccagcagcgtctcaacattgggggcaaagaatagaatgaagatgaaggccattgtggcaatgagagatcccaacatggtcttgcggtacccaaatcgttcggagacgataccgttggcaaacaatcccaggatctgaccacaattcatagcattggataatcctgcttgccatgctgccgagagcccttgggagccatctgaaagtgtgtgtccatatttttggttgaaggcggggaaaccgtagaacgatcccatgagcacgacgtcgtaaccctccatcacaattgctgtcgagatcagaacagaccatccaattgccttcgggtacagcttcaaagcctgccacagtgacatgcggtgttctttgtcggtggcgatctgggcctcctggaccaatgtaccaggatcgacgtccattggcgacttgtcgtcgggtgtctcgacatgctgggcagccgatttgaaatccatctcgttgattcagaggggcgaggtgttgaaaaaacgaggaaggtgatattggttcccacgagggtggatgaattctgagcgactaagcgtgcaccaactctatatatatcatcttccagaaatgatatttctaaaatatgaagtacatcggaacttccgtcggcgttaattttgctttttccaaaagggggtacgagttttctccccggatctcggtgtgatcataggcttcccgggccgaagaacggccgttcgtattgcagtggcttgtgactgaggaatgttcgaaaagccgactgatcatgttgtccctctgtaaagccagggtaatgagaggaagcttttcacatcgtatgaaaccagcagcaacaagcaatccgatgcggcttcaataacgaacgaaaacagagaatcggtaaaatttcctgtaaacagactccgttgccctaaggctgagacacggggtaatttgctcttcccagtggcttaggcggggaagcgacggggtaaaaaatctggttggccatcccacattgcagaaactggggaaatgtgcaagtcaaggaccggcccttctacggagctgcaccccgacctagcaaggttcgactaatgcggtcttgataatcctggtaaacacatcttgcaacttgaacatgcgaaccgtgcgggccgtgcattcgatctggattggccgccaatttggtaataattggaaagaaatatgacagtgacacgggagggagtttgccacggaactctgttggtcaagtgacccgacattaccccgtccacttcattaattgcggggtccccagaaactcggctgaccccgtggtttcccggctccggagtcagaggcccaacccccgaagcgacatggaagacagactcaatgtataacaaagcaaggtacgaatgatccgagttcgacgaactgcatatttttctaagtttctccacagccaactttgaacggaccttactgtacaggaagaagtcaagagcaaaaaatatattaataccatgacgacgccttgacagtgcacaccgacttggcatggaatcggaatcgaacaggatttgttggcccacccgctgccgtcaccgacgagatcggaaacagagcactcatactcgcttcgatcactgggatgaatactgctctcgaagaaatagttccatagctgctgtcaactgctgcgggttcaacaaaggccgctcgaaaaacaaatgttccacgcagctaccagttttgagcagtcggtgaaactcgcagagccatggtctcatcattttgtggccttcgctgactccacgaccctgtaaaggtgctggacattatatttgcgtaacgggcgggcagatatcacatgaacgctgttcaagctcgctaaagtcttccacgcgcatggttgatgagtggggttgcttggcgctcgttcggctcgcgtaagttcgaacgggtggcactcggattaccttctaggtacggagtcctccgtagtgagctagtcacctgcgagagtggaacttttcgcttctatgatgatctgtgtgtgcatcttcaataggcagctatcccgtgactataggttcaatattcggagcgggtaaagacctggggaaattccgcgggcggataatcggagtttactggggaaaggcattgtagggctctcgggctaatcatctcggaacgggctatcatcggtgttactgcggagtagatcttacaattgggagattgcccatcagaaggcccttataaatccgctcgctcacttgcagattgaacatttcaagagaattttctattgatcttttcctctcgttttgtttgcaatctcaaaatgggctcaatcgataattctatagacgcgaacgccgtcgctggacgacggaccgctaaggcttggtggaaagagtcctcggtgtaccaaatttacccagcttctttcaaggatagtaatggcgacggcgtgggtgatattcccggaatcacctccaagttggactacatccacaaactcggcgtggatattgtctggcttagtcccgtatttaaatcaccccaggtcgacatgggttacgatatttcggactactacagtattcacgcgccatacggcactgtcgaggatgtcgacgatttgatcctaaagcttcatgagcggaaaatgaaacttgtgatggacctcgtcgtcaaccacacatccgaccaggtttgtcccacttcctccctaccatgtgaatacacggataaggaaactaacatacacatttttagcacgaatggttccgcgaggcccgttcctcggtagacagtccttaccgcgattggtatatctggaagaaaccagtgtttggcgccgatggcaagcgtcagccgccaaacaactgggtgtcctactttggaggtaaattctcacacaatgcctcagtgtcttatcaagtaactgacatcgatataggcagcgcctgggagttcgatgaagcgtctggagagtactatctccacctttttgccacagaacaacccgacctgaattgggagaatcccaaagtccgagacgctgtacacaagattattcggttctggttggacaaaggtgtagacggattccgaatggatgtcatcaacttcatcagcaaggacccgttgttgccaaatgcgccgatcagcaacccagattctgagtggcaaagtggtgcacagtactatgcctgcggtccaaagctgcatgaatatctgcgggacattggaagcattctgaaagaatatgacgcattttccgtcggcgaaatgcctgaagtcaacgacgtgaaggaaatcctgaacgccgtaggatacgaccgtggtgaactgaacatgatattccacttcgaaatgtgagtgatctggcttatttggctcaaacacattggctaaccagctcgaagcgtttcactggaccacggaccaggaggtaagtttaccagcggtaattgggaaatgcaagatctcaaagccatcgtgtcaaagtggcaaacattcatgcaccaaaacaatggatggaacgcattgtatctcgagaatcacgaccagccgcggacagtttcccggttcgcgtctgacaaacttgaagaccggactctgtccgcgaagatgctggccactttcttgggcttccagagcggtactgttttcatttaccagggccaggagctcggcatgcctaatgtgccaaatggatgggcgattgagaagtaccaggatatcgaaacactgaaccattggcaagagtaagcatgtccgtctattccaaacacggtgcgaccactaacggatctttacagaattgtatccacgaagccggaagataatgatctgcactccactagtcttgccgaatatcggaagaaatcgagagataatggccggactcccatgcaatgggacgcctctacttacgccggcttctccgatgccaagccttggatctccgtgcacgatgattatccagtctggaatgcgtcgatccaggtggatgatcagcagagtgtatatcactactggtcgaatgttctgcgcttgagaaaggaattccccgatgttctagtatacggatcgttcgagctcatttcccctgagaaccctgacgtgtttgcctacactcgcacctccgagaccggcagccttgcgcttgcagtgatcaacttccgggctagcgagatatcgtggaccattccggaacaggtcaagaaactatggtcctccgggtcgattgctctgtccaactatccccagaacaaacgatctgtggtggatagtgacattgcccttgcacctttcgaggcatttttgtggttggcttaatatgttgtggctgggcaaaccccgaccatgccgtgaaatacatagttctttggggcttttcgtttcatgtgatcatcatacgttttcccgtaaattccctaccgtgtcattcgagcaattgcgtaaaactgtgggcctttttgagcactccaattggctagaaactccgtctaatagtcaagaagcggcccaaaaccagccccgaagaaggcccgtacctatcaagtgcatctccacctgaccagacctgacctgactgaccatcgcaccagacccgcgtggatttgcggggttatggctacatccaacggtggtcggtaaaaattgcccagtccttttcggtttagagagacaccccgcaaataaatatgaaagccgatgaacataactccgtaataagcgtacatttgcgcactgatcgggctgatttcggcaacaatgagtgcctctattcgacccacgcaacagcgcaccccggcctgcgacaattgtcgccgacgcaaggtccgatgtaatcgcgagcaaccttgtggaaaatgtcaggaggtgtttctcaattgccagtacacctccgtcccccgacggaaaggacccaaaggccccacggctcctgtgttaagctcgctgtcttcatcaagcaaccattcatctccacacacatcaagtgtctcgttcgcggcaagtgacgcaggacacgcagatgctgtcggtcctccctctgagtcaaatcttgaggaccaatggacgtttttaccaacgacagaatgcccagacacacgcttcgtgggcctcctcaagagtccgacatttcctactgcagcatgccagaggatatcccccgtcttgttgcaggctcatgtcgacatctttctcaaacatctctacccgatcatgccagtattcgatgccgacacagtgacagttgaatgcatgagccctgaagccctgtcaccgagacgatatgctttcatcgttgcgctgtgtgcggcgactcatctgcagctgaagcttgacatatcggagggtggcactatcgaagaactttcattgtctggccaaagcctaatcgagcaagccatacaagcgctacaagaattcgacccccttgacgaaccgcacaccgatacgctgcttgccttcttttttttgttctcggcgtacggcaacctggacaaacataaccatgcctggcattacttgagccaaagtatctcatttgcccacctcttgaacctgcaccaagaaccaagctacctagcccaagatcctgaaacggccgagttgaggagaaggatttactggctactcttcattaccgagaggtatgctttgcccctatactatatcctatcgcgcatacgtacttgctaactttgtacgacagagcgtatgccttacagcgtaacatgccaatcacactacgaggacgcatccagaagccgaccgtcttcacgtccaattcccctgcactggcttatggattcgtgaatttgatttcagtcttcgaaaagatcccatctagcttttacgactggaatgcgagtgccgcgggctctctcggtgactctgcgatgataaatcctatatatcaatcggttgccctttccacccctttgctggctgaatacaacgaaacccagaaagtcgatctaatcgtcacgcggcagtggctgcaaacacgtttatggaaggtagtaagcgatcaagtcgactcaacctgccatcagggagctgtcgtgccgttagatctcccaataacggcagggaagtccgtaatggctctgatgtcgactgttgcacaaaagtcagctgatgcgcatgggataggcatcgtaagtaattgtctcagcggaaatcggccctctgcttatcggtattgtaggaacaaaagctctacgacattggagagactgtgtcattgctcgcacatgtgttacttcccaggaaaaacgacggcgttggagagctattcgcgcacgcccaaaccgttttatgcggcatcatcgacctcctgtcgaatattcgcggaggacagtcgtatctattttcttcgcttcttcagcagtcccacgccatacttggcctcgaggccctgccgccgcacttagcgttcccttcctactggaatcccactctagctgataatgatggttccttgcccggaccagatgattgtatgtcactacaacgttacaaaacttttaaagacaattgcttcgacccgaaattgtcgacatgaaataggagtcgacaagcggaatcggtgagccattgactcttgcaatgcaaagttgcatatggatattcccctttgcccatccacgctacaaccaggaagctacaaccaggaatctggagaatgctttcccacgaaggttggctcggatttccaattgttaggccacaatttgccaatcggaatctcgagtctagtccgtggcattagttggctgagcgtgatccccaatacctaggtattcaagagggactaggacagaccacagagcagacgctgaagtggcgaagtgaccagtccgaggatgaggggggtttgagacggatgttgtaatatatgaattgtacgatatgatgaatatatgtagcaaccgaaagaggagtcctttcgtgtatatatatctctcttgtcaagacagatttccgtctttaagtacagaatgcaatcaacctaccacatgagaccgaaacattgaatgtttgttctaggacttaatagccagcgctagaaactaagaacgatcatcgaccatttaatgcaaaacggcctaggctatccgaacgaattgtctatgacgcttaattacattatttggctagtgaagcaccggctcagctccatataagctgtacatcaagaagcgcataatatcaaaacaatgcctctgatcattcctacaaccttgtgccttcctgcatgctgatgatcacgtggtgtgactggtttcattgcaaaggtgccccttgctacccatgttccccgaccaagaatgtcagattagagatgtcttcattaccacgtccgataagttggccccctgttggagatgttagaacggtactccacactcccttgccctattgccataatgttgcctgacgtttcaacaataacaataggaagacaaccaacccaacccactgagctcagtcgatgggtactcagacaatatcgcacccaacgtgggctattccagcgtgagggacgttcaaggccaactgatctcaggggggattactggaattgtggagctccttgacgatgggactgcactcaaggcaccatatccaggttctgagatcgaaaacaatatcatagatatcgccaaagaagccagtatctatcgtcgcattggaccgcataagaggcttgttcggatgctaggtcattccagggaaggtcttgtgcttgaatatatgaaaaacggtgatctcaagacatatggctcacgactcggtatcgacgagcctcaaattgaaatgggcgtaccaagtcgcagaggctgtcgatctcttgcatagaaacggaactatccattgcaatatcaaaccacgaaatcttctgttagatacagccttcgacatcaagattattgacttctctggttcttcactagatggttcgaagccagcctctggtgaaggaacccgattttttcttccacgacattggagagagcaaccgacggtggcgacagatcttttcgcactagggtcgactctctatgagattactcaaggcaccagcccgtatgaggagcttcctagtaatgaggttgaaagattttttactcaaaaagagttccccgatatatctggtatagtatgtggacaaatcatcaaacaatgttggctatctcagattgattcagcagcggatgtgaaaactgccgtctgggatattatctctcgcacatccaaggttgactgtatccctcacctcgatggtttggacactgctcaggatatgttgattggcttggtttatccttagagttggggtagtcccaccgttctgtcttgtcttggtatacccgcaagttgtcaggcctagccatcctcgaccatgtacccacctccttgcaccgctacttacatcgctccttccagcaggttaatttttacgatattgtatttcaacatagcgagaaagtatgagaacagtatggggtagttccttacgatttttgtgccgaaagagtgggtaaagaaattgagcgaagggagccacgaagctctctgaatagccccttgaatggaaaaggactcagcaacagaggcccgaggtcgcacttggggcaaagagaggtctgtcgacctgcatgaggtgtaccaaactgcatgaagatagtcaaagttccgaagcatgcctgcatgccacagacgcaataataaaaaccttgttcaatctcaatgccatgcgaatccgagagctggccgagttgacagagctggaattagccgtcggagtataatttcagcactggttcttgtaaatgacagaaaatctgcacgtggaaaattgtcggcgaacggaagccgtgacgaatgagaagatgatgcagaagcatttaggagctgtcgtacgtcatggggtcttggtataccgagattttctcaacagtcattcgcagttggcaaaactttgtttcttattgtgaagagactccgaatcccggagtctgacaagcgggctccggggctgttcctgatttgtttcgggccttctccgggcagtttggtttgcggggaacggaccagggtggtttgcggggaccccacgcggctgattttgtgacgaacgaaaaccacgcttgcctggattggtacgtaggcggcttccattggtcattctcgaaggattggtttccactgcgtaacgaactatacatagatagcggatttttatggaattactcggaatcaagtacaacgtacgatggacaattcggtgtggtactctatgccgagaaaaccccgtcgaggacctgacgacgagtgaaatcgacgagataacccactttgacatcccaaatggtcgaaaaagcggagcttgggtgtacttttgatttgaaccgagccccctggaggacccatatctcatttgcaacataggagaatgaatgggttggattactggtaggagctatactaatcatattactcccttgctggaaggggctcttcgtctctgtgttagtaagagtcccattgttatgccagataagacgcggcatactacactagtactatggggtaattaatttaacgaacttggcattcgcgtaatggaatggctctcaaaccctcaaccgtcaatccctacactaagtatgcggtaggccccctccatggcatcatcaacaagactgaataataccggtcaaccgtcatatgccgcacgaacacctctcggagcttccggcataagctgatcccccccccttaatctaaactttcatctaatccaaacccgatttaattgttggttagatcaggcagccctattttaaaaaataataataaattccgtcttaatatgtaaaaataccaaaataaataacacaccaactatgcacgagaattcacgagtggaggcgggtgaatccttcaggtatataaaaaccgttgtataaagactgctttgcccccttgcttggatagaataacaatcaattcagccagcatccattccttcactatgattactctcaaatcttttctactccctgctatcgggctgcaaaccctagctggggcgtttgttctaccccgagaaacggattctacccccaatacacactgtggctcggatttctgtacctggtggcacgacacggccgagataaacacagccactgctgtcgaagcaggcaatgtccggcaatctcaccaatatctcgttcaggttgccgctgctgggtcgaacacctcatacgattccttcgtctacgaaagcattcctcgcaatggcaacggaaaaatccagacccccggagataccagcgacacattcagcggcgacgatggaatttcaattgagattgatgctggcatcaatatggcgtggtcccagtttgaatatagtgaggatgtcgatgtcaccatttcccgcagagacggtcaggatgttggcatggaccttatcattcggccgagtaccattgcgtatgaactcagttacgcggacaatgcagtgatcatccgtgtccctgctgatgaaaacggacgcaagttttccgtggagttcggcaacgacctttacaccttccggtctgatggagaagcttataccaccgacggatcaggggaagtcgttgggattgaacccatcaacgctctgctcatcttcgccagcccattcctctcaagtgatcttatcccagccagcgatggtgccgacaccgtggtgatgacacctggtgcattcaccgcaaatgacattggctcggcatctattgtctacttcccgcccggcgtgtactatatcgactcggaccctctgggtgaagctcacatcaagctcgatcctaacacctactgggtgtaccttgcccctggagcgtatgtgaaaggaggaatcgaatacaccactacagcccaggacttttacgccacaggccacggtgttttgtctggggaaatctacgtctaccaagcaaacgtggaccaaggctacacagcagtcaaagatgacgtgactagtcttcgaatgtggtggcaccggagcgtcacaagcggccaaatctggcactgtgtcggaccgactctgacttcgcccccgttcaacaccatggatttgatggatggaagttccgaccgagacgacatctcggttgatatctacgattacaagcaggtcggggccttcttcatgcagactgatggccctcagatgtacaccaatggcagtgtgcacgatgtcttctaccatgtgaacgatgacgctatcaagacgtattattctggagtcactgcatcccggctcacagtgtggaaggccttcaacgatccgatcatccagatgggctggacacctcgcgaagtttccggcgttaccatcgatacactcaatatcatccactcacgctatcgcaagagcgagaacggtgttccttcggccattattggtgcttcgccaaactacgacggcagcgacaatgttgatagctccaagtcaatcagcatgagcatttccaacgtctactgcgagggtccttgccctggccttttccgtctcactcctctgcagaactataagaacttcagtgtaaagggagtatccttcccagatggactgatcggtggcagtgtccccgtcggagacaccatcattgcttctacaagtgataccacttacgatggatcgactagtctctccatggagctggacatttcgggatggaccgtccaagggcaagcagtgactggagacaatgcagactctttgggtcaattcaacatcaatagtgcctactctggacagtggtcaatttcttcttgattggtataagctatgcttgacccccttaagagtttgatacgctcatactcttctcaaccctcggtcactcatttgtatatatctttttctttttcttcctcagtttgttgatattttcacttattataaatccaaattattattccttgtcagcctcaattcaagatactcactctttactccatccttctgctcgaaccagatcatttccttgagcatttcctccaactgcagacccaaccttgtgacttgagcatcttctattacaaactccgcttttacgatgccatcactgccatcgagccaatcagtaagatgagcatcgaattttcggtcatcggacacatgctcgaatttcaaggtaaaccccattgagcgatctgtagcatcgatgaagagcgcatcatctctgatttggaccaataagttatgatacccaggattccagtagttgccagcgtaagcactgagaggcattgtcggtggctgcggagtatgcctttttggtctttgttcattcacttggcccttctggatatcttgactttttttcacttgggttttcttttcctgctttttcttctccttctttccctggttcttactcattggatttgcatctttcacctcggcctggggttttggaccgcgaattttaacaggtcttgtggctttgcttttgctgtcatgaggtctttcgtccatgactccaaggagattgtcaattagctttcggacaagggtcgccgcaacgccatttgccccatctgagtttcccatgatcacagcaccgaatgagaaatcagggagaaagaagaagcgacttccgaatccagagaataccccattatggccgacgaccatatgtcccctgtaaaagtagatatccagaccagcagcatatgctaccggtgaggtgtgccgcttccgtcttcctgggtttggattcacaaaagttcgcaggcgagtgagtccttcataaacatttttattgatagggtcttcgcgattcataaaagccttgacaaatttgatgaagtcgttcacgctcgaaatgacagaccctgcgccttggccttctgggcagtccggattttctaacccacgatatgttgagtcggctcttttccatgtgtagccagttgccatgcgggattcgaatccttttgatcgtgcgctgctgggttgaagagtagttgatgccatgtccagaggcttgaaaaatcgctcttcgaggaatgtaccaaaattctgtccgctcttgacttccacaagatgggttgccactgtatacatcatgttgcagtaaatatactttgatcgaatgggagcagcgacagggagattcctgaggtttctcgtaatggatcgagcattgtctggcttcgccgctcgcacactcatataagaatcgttatggctggcgcaatatcattagtcttgaactcaaccatgaaatttgaaaaaactagttcacctaggcattccacttctatgacttaagatgtcttccacgctgactccttctgtgtatccttttccagacataacaaagtcctcggggagaagagtcgacattacagcatcgtactgaatatccgggaacatgtcattatcggcgactagcaatcccaccgccgcagcagtgagtgatttagcagacgatgcaatgtcaaacagcgtatctgctgtgcaaggtatttctggatccaggctcgcatgtccatatcccgcagaggcaatttgatcattgtgtatgattgcaatcgccagccccgggacatgctgctgatctatcaactctgtcacatgtgacgcaaaccctgccgagtgcaaaagatccatattgctgatttgacgaattaccggtgtgcgttactgaatgccactatagaggcctgttcatgtaggttccagccagtttctttgcgggaaaatacctcagttcaaaccttgaaatgacagatgccacctggcatgagaatgggggccggattataacacgcttggtcagctgcaacgcttagtgtgcatgccagtgccagatagctctcaacgttgggcccttcgtatcgcctaaccggggcggtggggcttcaatccgactgctgcctgtttgaccatttaatagaaatatcacaggcacttctaagttgtaggacttcatacaatttctgtatcccatgcctaacaagaagactatattctaacgaaagatagatactcatctactattaccataattttagcccttactggagcaagagatgccaaattacctctcgtctgtctgcatgctgtcatatagcgccttgaacagtgatcctggccgttcaagcagctcacgcggtgggcctcaacgatacgccctttgtttggcaccacgaagcgatcaaggtccagcgttgtgtgtagcttgtgaacaacaacaatgacagtgcacgcctcaaattctttctgcagaacctcgtgtatcaaagtttccgtatccgcctcaacactgccaccaacctcatctataatgaggacgctgcttggattgattactgctcgaacaaggcagaacagctgcctctgtccatgcgacaaggtcccttcgttcatatcctcatccagcccgccgcgagactcgcaaaagtcccataggcgcacagactgaagtgcctgaactaagcgctcgtcagtagagaccctgagaggatcaaggttctcgcggacggtgccttgtaggaagaacggatcttggggaagggagttgaagcgagcacgaacggcctggcgagtgatggtgctgatgtcgatgtcgtcaacgcaaatcgatcctaattgaagctccagcatgcgcaggagagttgataccagggaagatttgccgctacctgtgcgaccgcagatggctacattttcaccaggtgttatggaaaggttgatgttcttgagtactgggtccgtggaagtgtcataggatacagtgaaaccgttgaatacaatggcacccttttgcgggccatttgtcgctgacatgtcctgtctcattgggcaggttctcgtcttttgtgtcgagaatataggtacggacacgactgatagccccaagagccatttcaatctgcgtccactcagtaacgagcgtctgtagcgaggtactgaatgtcacgatttgatacagggctacgccgagatagccagttgagccactgaggctgatatttgtcaccaaggcaacgagaataatggcgattccagcgataaatagatccagtaccattgtcagccatcgctggacacaccacagcagatattatggcttttatgacacgttgggggagtcgtggacggattcaacgtagtggcttgtccagccaaaggcccgtccagaggatataccacccaaatttccaagaaccgggagaagagaggcgccttggcttcaatatcgagtattcgcagctgtctggatgtgcgcagatatagcagctggatggccacgatgactacaatgcacagtgtaattgcgatggcgacgtagccagaggcgatgaataagaataagatgaccgccgacatgatgactatcatcgaaatacgatctttgaaaaatcgaaagactttccaactagaataagtcaataggtacaaagctatctgcactggatcataataactaacgaaaacaacttattcacacaaaggtaggttgtagcaagctacaacgttcttctcaaggtataaagtggggcggaaattaagcggaactctaaagtcaagatcaaccaccttcgaatgtcatcgagcaccaatgccttgattgcaacgctttgcttaaattatcagaaccctagagaaggcccaagagtacctgcaatcaatgatgaacaaggatcttttgtgccaaactgggctacgccccactatgatctcagtgactccagcatgacatcacaaccagcataccaagtataagaccgagctcttccaatggtaaaaaaaaaaatccatcaaactcctcttctattcaaacgaactacttctttacgatacttctcaacctctcaatccctaaatccactttatatctacacaaaatgtcgaactcaggtcaatccaacgtcggaaaccgcagcatctacgaggcaggcgaccagcgcaacgtccctgtatccgagctccaagagcgggcccgctatgccgagggtatgcccaatagccacaagcacctcgattctaaggacggccgctccattgccaacaagcttgcctctcaggagaacaagcctgactccacacaccaccacaatagcgagtacgacgctgaggccgagttgagcaagcaaaatcctaccaagcctgtaagttacatacaacttttgctcacatgaaacccttgatcaagatgcatttgctaacgcttagcttcggtacaggctaccctccacggcaatgctccgtccaagggtgctaagattgatgctgagctccaggctgatgatgagcagcgtctgcgggagaagggcattaagcactaaattcgataatgctgtttttttatgttacaaataccccctcatgtcttctgattggaatttgaatattcatcagcgggggatgggagggttcatggtggaacatgatgtacaataataatgatatctggtctaacgttatctcaaatgagtaacgggccattgaatgtatacctacattgatgacaagacagacgggcgttgaagatttgtagcttgtatacagtatcttgtagattttgaagcaattgaagcacgtgtctatgtggttgtctgggtgttcgcaactctgacccgtcgctggttggatgaccaagcataatttaacgctatcgatcggaatgcacccgaggtctgcgggtcaaattcttcatgccacttccacctgccaaagacataggaagtagcgtcatatatcatttacactttcgtacgtggaagggagaaccggtgtaatattttacatgaagagggaaaatgtggtccaaatccaaatataccattgtaaacgtatgaataaatagaacatatgtcgtgagatcgctttcgaaacacaattatacgatatgtacgagacagatgtcaaggcgaagctattgtacatcatgaagtatgacagcatatacaaagccaaacaggcaccaaatacctgcaacccttccaatagggtgactgacttattatttagccaaaatagaatggcttggatgatcgaagagccccactgccaactaagacagggcttatccacacagataccgaggccatagcaggcgtatatccggagtgcagttggatataagccaaacatcggaatcctgttcggcgagtggagtggaggggaggagaggggaggggaagctgactggtcgagaagcgagccaaggcacaaaatatgccagtgagacctgagatcagccatccagagtaaacttggggtcatcgtcatgcggctcggcaaagacatgaccccagtattcctcgactctcttgcataggtccactttgttctcccacgttttgaacgcagtttcaagattgcagctcacccatttgatctcctcccagtaagccttttcgacatcgtatccaaatcgcttgatggtctctgggggtgccaaccaagcgcgtccatctgagccgtccttctttaaggtaggagttgtttcccatcccatgccgaagatccggtcaccggggttgaacttgggatagtttgcgtggatgaagaagacgtgcggtgcgggggcaaccgactcgtcttttacacgccacttgtcctgctggatcaaggcaaaatcctcgcgcggatctgactgtgccatagccgacccggacagcccgtccgcgttcgcgtgtccgacagcctgcacacgttcactgacagtatagaacggtgcgcctacggctgaggcagcttggataaaggtttccttatctccctcgccaggtgccccttgactcaacaagcggaaataatgcgaggggccgtaaaagttataatacgctgccagcaagagcgctagagagtgagttttcttagatactaagaaaaccccggtttctgacgactgtctggcagccatggacggtgcctgttggcgtgaaattttgtagtacaagggagatgcggaggaagcccagaagtcgggccatgtgacaagaccattggttttgaatggctccgagtcaagcaaatcctcgggtttaccaagagggaagcagtcggcatccatccagactatttcttcaaaggacgagaaaagaaccgcgaagatcttgagttgatagtgttcaatgatgtttttacccaccacgtccgccagcaccaagcaccgcgcatcgagtttaggaagcacctcgttgcagatttctttctcgtgttcagtggcgtccttcatgtagagttcaactggcaacgttgaccccgcgcgacggagcatgcgcaatgatgagacaaacaccgggaggtatgtagagccagctgtcgataccagtcctcgcttgcctggggtatgaatcggtttcaactccttgtctgactgcttgatatcctcgatgaaggccgcatgggcttcctccatcttgcgtacatcttcatcgctcaggcccgtcagatcgggtcgcggcacgtcttttgtggggtcaaagtgctgggcttcgacatcgcctcgcttttccggggaagggcaactcggcttgtggcgttcaattatgggtcgaagaactttccagaagtccttctggcgttccgtgagtggaacctcgaatgctgtgtttgggactagggggacgttggaggacgcggtgattggggatcggtaaaagtagacggtgcacactagaatcagagcgagcatcgctagtacgagcgccttcgctctcccaggtcgcaaagcacccattattgctagatagttcggataactgcgcttggattcaggggttgaaggagcggcgcacgggcacgccgatcgacttttacttatcaagtgaaggaataaaaaggattcatatatgtattgcccgattcacagaatgtgacgaccggaggagttggttgcagagttgtggcgcatccagggagtccgggcggaaaagaagattaggcttggcaaccttagaaggcctcaacggcctacgtaccttacgacgtacatgcacgagttgctggaccagtatgtctacatatattgtcctatataatcaatattggatcctttgaaggaatcaatatcggacatgagacacgagaccgctcgaaatcccccgattgtacccctgaaagccgaggcctgcccaggtgctaactagcattgaggccacatgaaagatcgaatcagaacaaatatcagacactgatatttaaccactcccatattccaatggtatgaatgctttcatgatcatcgtgggaccatttgcctttaaaaggcgtccccaatccacgtgggcaggtcgactaaagcgcggatcagcctccaccggggaagatcgcatatccaccccccaacctttcctccgtcatattattattccttctttttgagtcgaaactcagagagtctacagtttctacttaaatacgtcttccccccaccaaacccccaaacccctattggattcgccgatctttcgggattccatatttccgccccaattacgaatctacggaatctacccgcacaaagtaacttacgccccgtgaacgcccattatttcaatcgcataggtctttcaggagatcttgacggatggactccatccgggcattgcccacgccagctcaagatggcctccgataatgttgatagtcccatgcgagacgccgcgcccaagggaaaatcccgcaagaccgacccgaacgctccgatccgaaaacgccgcaagagaaccgtggtcagcggagcgtccgacgactgctttgcctgctccaagcgaggagcacgatgtgaccggcgccgaccctattgctcccagtgcctcgaccttggccgcgaatgttccggatacaagacgacgttgacatggggtgttggagtcgcgagtcgggggaaactccgcggccagcatcttccggtgatgcaatcggaagcacagtcgtcggggaatgcagcgagatcacaatcgaaggcctcaaggagcggtgacccgtcttcttcacggatgcctgataatgcttcggcgcctccgtccaccggccctgcaatggcatcgtttgaagcaaggacgccgagtgtgaaactagaaggtagtccatccatgatgccagctgccttcgacatgtcttcaaacctagcttggacaatggacatgccagatccacaatcgtggtcgaacacgcttgctggtccgcctgcgatctcggggcttccgtcacccagtcggccgatgattccaagcaatacgagccaaaatatgacctcggagccgccattgctgtatgctcccattcagagcccgacggctaattatggctctctggtttggccgacagcagttcgattttcatctcacgctgctactcccccagcgtcacaagccgatgaggaggatgtcaaatacgatcctaattatcatgtgttttggaacgctgcccattctccgtcactttcacagctccttttggcacgatccgtagggcggaccccacgtattcgttatctcatcagttactacgctgaagttattgcccctatgattgttgcttttgataccccaacaaacccgttccgaactcacgttatacgcttggcaatggagagcgaggctttgcaggaggcgattgcaacgttggctacgagcaacttgcgccagaggcgagagcacaatcatctctccacggaacgaactctgccggcacgtatgtcatcaatggctcaccgcgccctcaccgacgaagatttccaagatcgatatggcatctccatggtcgaagggtacatcagagaagaaaatcatcatcgagggatggccgtcaaggctttaaatgctgatttagccgaccctcgtcgcaggttatcagactccgtactggcaactctgttggtgctctgtcttttccatggctgcgatactggcgttgccggattccgtgcacaatttgctggagtaacaagactacttgcgatccgaatgcgccattcccgtgtcgtaacggatgaactaaaatggttcatccgcatgttctcgtggtttgatacattgacggcaactacaaatgaccgtgatgtgcaactccgcggaacatgtttggaaatcagctccataaccgatggagaatggggtctggagaacctggccggctgcgatggtcgtctgttcaagctgatttctcagctgggacgattgaatcttctcagccaggaccaggagcccaacctatcgcgcccaaacgatgctggtgtccccactgcatcccttcctcctaatatgctgttcccgggatgggacacagttgtgcccaatacaggaacgggctccgtaccggaatacggattttctcttcccacaccgccgcaaagcagtgactcatcccatcgtcctacctctccagaattctggacagagtggtattcgctcaggcagcgactcgaatcctggcgattcgacccacctgctcatgcctctttcccctctccgcccttatctgcatctgcaatggcctggaatgccacgacttatctgacgccacggacttcctcctcagcataccaagtggcacccgagaatctccaggacgtctaccagatctcggagtgttttcgtcatgctgccctgctctactgcgaacgtctagccgagccgacccttccatcgtctcatggccgtattcagcaccttgtccagctcgccatgcattgtattattaccgtgcaatcggacgtatatcttctctggccactgttcattgtcggctcggagtgtgtccaggataatcaccgttcgatcatccgcaatcgctgcaaggatatttccaaggactctggcttcatcaacaacctttcctgtctagagcttctggaacggatatgggctgagcattctgatgaatcttcattcccagtctaccctagcgggttgggtcccccgcctccgctggctggcggcagggcaccatcacaagccttccgttggtcgcgagttatgcaggccaagcggggtgatggtgagtacatggttgcgtaggcggtttgccttctatctcttttaatttttttgcccgagctataagcttccggtttccagctttacagcattctggtgggacgggcccattggatttttctttgttcgaggatcagcgactcgtgtcttcaaatgataccattcattctatattcagcaatattccccaaccagtactatctacattgtacatattggctctttttttttctgggtttgcttcgggaaccagccttccatacatatacctacaaaatcaggataaccattcaaaatatagaccacgtcataattttatcaatgaaatgaacctataagacaagcaatttggacaaaggtccttcgtaatacgttgtatggaataactaatctacgttctacaccaccaaggctcaagggccaaatagggcctggcccaagccactcggagataaccaaccccgagtcatccccagttgatatgcgcaaaagtaaaactgcgcaaaaggacgaccacataacaacccaacgcaggccatctttccctatcacacatctcacggcgctacgacaaaagtaccaacccacaccccaacctagacctataagcgcttagagactacattatagggcacagggcaagggcagccacccaaaccctataagatcagcacgcacaatgaaaacctcgaaagtttaacacaaaagccggatagtatcaataatacacgtactaatgaccgtcgaagatcttcccgaccgctagtattccaaccgggcctagaatactcattacaaacactaaaatgggttcaaggattcgttttgattctcccgcgacaaagccgatgtccgctcgtgcaaggggtggcagattaatatgattctgttgcgaaccgtaccgttcatgtgatattattgatggatcttatccagagcgtgcatgtttaattagatgcctagggggtaaggaggtaggtaggcataggtgcttgtaaatgtaggtgaagggttgttatcattaccgctccctgtacttccggacttggcggacttgatatcaaaagcaaatttaccaatcatcgcacattgaaatcgaggaattcagcagtctgtaatcccccgtacgaagtacagggtacccacacggcatctaggcgtccaccccctatatgtatctaaaacctgatcgtctacggagtagcaaggatgttgagccgttaagccgccacggcttaatacactatgtaaccgtaagccgtactaagcttagatactccatactgtgcgcatcgcacgagaagcacgggatataaattaaaaagagccaattatctcgctcagggggggggggaaccggtgtacaaagatgtgtgtgcgtgtccccgtgcgccagttcaaggttatgttcctacagccgagaaaatatgcgtcccggcttccagcccgttggccccctgcagccttgttagcgggcttgttggtggattttgggctttaaaccttgttccagaaattctatcactcctaggcgagttggcattacgcactaaataaattaaatggtacatggatttgttttctttctttttgtccgtcctcggctgagatcagcttgggtggccaaggaggtgaaaataggggggggcgatatcgagtcagatctgttagacgtcggattatctatacaacatagacagatacgtctactccgtactccgtatatattttgtttttaatatgcctgcatgtgagatctatcctgcagatacgatcaaaaatatgttaggtaggcgatatttcctttttggaaaataagtaaaaataagccatgtgcaaccctagatgatcggcagtgcaggacggggtttggccttctgtttggctggttgattaagacaaggggggaatctcgaagggttgactcattcagaaaaacaaagccctcgaatcagggatggacctgggattcttctgtgtgggcagcaaggacgcgctggaaattccgtctttcattcctttactcggtgcgtgagcgtaaaacctatgttgtatttatggtatttgtggctgagccaagttgcagtggctctgttctctacgttgaacatacagaggcatgtgtcctgtgtcctaaaatagagaatagttgtagatatcgttgcagtattagtgtgtagtttatagttctaggctataactagcactgccagtcatgacgcacaatgtacatctgatagcgttggttgggtcagattagtcccaaaaagtcagactagggcttagagttgattgtgatcacaacgatagcgagtcgcctattgttcatcgccccacgctgaaacaatgaactgtcggcggccaatgtcaaaaattgatacatagcagggtagtgatttagaagtgacttcattttgcttatgttggaggacactacttcattatgcggcttcaattcctaacgtgttgtacacagccgctgcgcatcccacgatttcttacgagtgcttggtaataactatcctatttttattactctgtacgaaaatcttcatcccactcgagctattgacggccagcaagttgcggtctgcaaattctctatttttttctagcccgaaatggcggttgctgcccagcgacgcagcggtaaagcctgtgcatgacccgtgatgtcgcccaagatggcagtgcgaagtggatgtgtgtgtaaaagatatacagatggggctcattggccttttttgccatggcaacgtgttcgtatatgttacatagtacatagtatagagtacggagtacagagtaataatatctaaactgtttggagccttggaggttagtggagtctgaaccactggacgagacgggatgggccgccgtgacacctgggatgccgtcggtccaaccatggaaccgacaattcatacatccatgcctacacctggtacaacataagtacttacatcggtcccggggtgattaccactattagaggatattgcttcatatgctcgagataaggtatcattctcccgtatacagtattctctattttgctgcaactaatgatggcgttcatgcagatgaactgacggggcatggaaaatgtaagcccagttctggaagtcgagcacatggtttgcgctcatccaacccaaccatgacacgccagctgatggaggggtgatctaatcagtttcagcgccagacatatacaaggcagccagtaagatctatcatggaatgacgctatgtcttagtggcaacagtcacgccagtttttttctttacctcagagtgactcagtccaacaagagcgagaaaaaaaaaaacctcgctatgcagctgccttgagactggcaaagttaaagacaccgaggaaaatgcagttgtccgctgcccgatctaactgaggggctatcagccaagcggttagcatagcgtccaatggaagcatcttcatctggactagcttgaggggtagagacatcgagacttcttcatggtactttaggttatggtggattcacgagtgtcgtagaatgtaccagttcctcctagagtagtgatcgtatttccaaggttgccacataaagttgagtcataatatgtgatggctgagctcgagcgcaaggtataaaagagacggattatcacccagaagaaggaatagtagacctaaattagaggaaatgaatagaataccttgaaactcgtgaatttcaatacccgtaagaaagaaacctaacgccacagccacgacgccagctcacacgcgccggctactcgctgattggccagcgcaaatatcgccggcgctgacattgggatccatctgtcttttccctttcatcgggtcgaattttttccctctccactctccccactgaattcaaagccattacaccttctggagcggatctctgctctttgttttcctcaatccccttttatcaataggagatcttgggtcctaggatcccctaaacgcactctctctcttttcctcggattgaccgaagaacgttcaaatgctctctcagcacattcagttccaatcctcctcttttcgatccaaaaccgtaccacggtgacggtcctatcaaaaaaatcctatctggcctgcagtcttaaagtcggcgtcgattattgtttgggtgcacgatatcctgtataatatactcggtgttctttttttttcttgctgatttcatttaattgcctttggattgtttgcattttcggcttgtcgcctcccatttacatttatctgatcgactggtgctccatatgctcgtgcgataatgtatcattactccagtccaccacccgggtggtcaacctacgactacacccaaactcaatcacctcccacctcacctcaatacgcctactacgcctctcagttcgccaacgcctacacttcaccccgcgggacctcgcgacgacacaaccgcaaagccagctactcaaccaccaaagaaacaccatggtattcgtcgggccacccacaaggctactatgaagcaactccagactatggcattccatcgcgaaagcacgatcatgtaagtgcttcttttgcgggaaagcccaaacaccaccgatactcctcgaccggtcaccctacgggggatggcctcggcaacggataccacccgtcgcaatcgcaggctcgtcccatcttcgtagatgtggtcgacgaagcattcgatgtcccgcgcacccacgttcgcgaaccccgtaccggtcgccgtcccccggcctcgaaccccactcgagatggccctggccagcaccgtcgcactacctcgacctcttaccgcaaatcaaatccagctgattctcacttttacttcactcaggctcctaacggcgaggatatcgatgcggccagacgttcccataccaggcgccaatctacatcaactcgcactcccaacaaacccaaaccaccgcctgcttctgccaaaccgccacccaccgccaccgaagatgacgccgaggccgcagggatccctccaggatattcgatcaaaaactgggaccccaccgaggcgccgatcatcttgctcggtagtgtgtttgatgcgaactccctcggcaaatggatctacgactggactgtcttttatcatggcgcatcgacgcccatggccgacgtcgcgggcgacttgtggctattgttgatcaagctggcgggcaaagtaaagagggctgatgaatgtctccctcgcatccatcgcgtggaggcgcaggaagtcgtcgaagacttccttgaaagtggcgagcgcctctggtcccgattcaagaagctcctcaagggctgcgaactttacatgtggaaggccgccaaacgagaaggtggcaaagggcccgtatcaatgggccgcaatgcaggttgcgaatttgtcgaatcgattttcggtcgcgaccgtgagcttgaaagtaccgagaagctcatgaatagtattcgactctggaatatgcggttcgacgccaactgcgaagacattctccgccgaccgtcggctgcatagaatgttttcttcatacgttttattttttttttcactagcgactgccaagggagcgatacccccaaagagacagattttcctaatactgcttttcttatctacatttggagcatttgacacttgttgaatcgcatttggagcgtgttgctttggcttcggctggctttgctcgtcgcatttactgtttgttttttcgacccatgggcagatgttgcccagggtacaacacaaaagatcattgttattgttttgctttgcttttctggtgccggcgccttgatttgacctcgtttctttcataggacggcgcccgttttatccattctacttcattcctggcgtccttgtttaatctttcaattccggccgtcaagttcgttctgtcttgccgttgaagtccgtgtcactctgctttgatgataccatcttgcgatttcttatatacgtgcttttctactcttgtctcttatttcctttgtccttcgcattacagctgttatccagctatttttctgtccttaatgcttgatttgatgttgggtcggaggaaccgggttgtacatagaaccaacacgacccaaacgtccgatagaccaaccctaacgctcgttatacttttctattctatactttccgagatactccgtaacatgtaaaatgaatactatttccacgtagcccaaatccaccaccaaatagcctgtgatgtgatgtgatgtgatagccctagagctacccctcaccccggcgcttcctgtgcaatgcaagtacgtacatcgcacattgtggatcactaccccgccctgtaagaccatcgaaagcgtctagaatcaccccgggggccgccgttggttgctcggcttggatactaaatagctatttgatcattcactggctgtacgccctccaaatcaggtactatatctccaatgacggcagctgatgtcacgtttcatataagtgtaggtcccagcgttggatcagcttgcatttttctcatgcaggtgatcgcagctgctattggcttagatttcgaaatccaaccgctgcatgcacggtggttggcggtacccgagggtgtggcggccctatcacaggtgaggcacgggagtgtgggggttgcgtgcatgacttgtggctttggtcttgggttgcatggtgatcctggatttgaggtgttatttagaatgaacggtggctgttactatttatagttatggtggttgatattgaggtatctggtttagtatgaatgtaggctttgggggatttgatactcttgctgggtatatgtgagcagcagttcttggcttctatactgaattagtcttggcttggacttggcttagacttggctgacttggttaataaatctcccccttggtttggagtcatactgtgcttgtgacacgtggctccgaaggttgaactgtagaaagcagccgagcagctataccatatggaaactcctgggagttgacatgacatggaaagctcatgacagtctgccatggtataaaagcataaacttagcaatacttcatagccaagaccatggaggtggattccaagtccatgtggccatgcaaccttatttgccatatcagacctattttctctcagacttgttcaaaataacttctagaatcaaatttctgcccaggtgtgttgttaactgaggtctggaataatgatgacgcacgtgggacggtcacgggactgccagctgactgatcgttgaaatcatccattccaaggttttctttgtgaagtgatgttgtagtgctcgaaccatcgaattaagatgattaggtgatatattattatttcgagttgatatttttcggagaattgcttgggggtcaacaactaccaagactcatactcgtcttctccgctgtcctgatgcaatctcccaaggacagatgaggatgtgactcttcaagattcccttaactcaaatatctagctcctggcaatttacctgattccaagtatccgaaggatttggcctcagacctataagggtcattcgacttcccgatctgggcacatggctatgctagatgaatatctacgacagttgcgatgcctacagacgaaaagtctgataggctatcaccatgggaatggatccggagtcagattcacatgaggccacctgaagatgacgaaccgcagtggtggtggattgcgtccacgaccatcccgctaattgctgctacaacgggaccactcgccaacgttatgtcaatcgttgcgctcgttatgccatggcgaagcaaaatcctctcggaaaatcaaagtgctgctggaaacttcattcaagaaggatatccagatcctcattggtgagtacgggcgagagggcgttactttggatcggattgtctaacatcacgaatagggccactgttctaaatgccgtttcgcttttctgcggaatcgtgggcaatgcatttttactgttcaatttcacacagattgtacgctatattatagccttgcccgtgacgatcatttcgtggttcctagctgcgggaatcgtgagtaacttctctagttttgtatgtcccagacctaacgctcttttgtagctctgtggaattaccatagccatgcatatatatgctcctccagtaggcgctgatagggtctactcgcaggcgtattggagtgccgtcattgcggcagtcctctattttctcttgggcgtcctcttgatgatcaacatgctaggctatttcctgggtaaatacccgcaacatttctcgctgaccaatgagcaacgaaccttgatcctacaaatgactgcattgatggtttggctattaattggcgcggctatctttcaacgggtgatcgggatctctttcgccgatgcattgttcttctccgatgtcactgttctcaccttggggtatggcaacataatttccaccaatgccgttggtcgaggtcttatttggccatacgcagtcattggaattatcattctggggctggttgtggaaagtacctttaaatatggtcgtgaggttcactacgataatgtgatttggaaacacatcgaaaagaaacggcaatccactttcgaacaatcactcatcaacgagctcgagtctgctaaagataaactctcgcctagcggagttatcacccctccaggtctcacccgccaaaactccaagactcgacgccatcggcatcaccggccaatccgcaacaccatcaacgctatagccacggctcgccgacccaagattctcattatgcgtgaagaaaaggatcggtttgatgctatgcgccgtattcagttcgatactatgcgtttccgtcgctggaacaatttgatcatgagcgtcgttgcattcggaattgtgtggtcctgcggagcagtggtgttctggaaattagaggacattacctactttgaatcactctacttctgcttcacctctctgttgacgatcggctacggtgatatcacaccgcagtcaaatccaggaagacctttctttgtggtatggtctctaatcgccatcccaatcatgaccatgcttatttccgagatgagcgacacagtcgtcgctagcttcaaacgcgccactgaagtagtcgctgattacgtcgtgcttccccaatcccatgtctataagtcatccttgggtcggattcctatcgtttcccagttcttgctggctcgccaagcgaaaaagcaacgaagacgcggtttcccccttgagggggatgatggatccgacactggggaaagagcgaaccccgaggattctagtcaacctaatattgaaagcggtaacttggccgagtctcatccgcaccgatcccttgaagaacttgtccgggatccgaccccactcgagcttgcccagcaacttgccttcgctattcgccgcgcgtcgaaacaagcactggaacgcaagagaaagcgatattcctacgaagaatgggtcgaattcactcggctcattcagttcacagacccgcgagctcggcgaccatcgtcacagagaaaccagccagcaagtgaggaaggcccttctaatagtgaagacgaatatggaattctcaattgggactggattggtgaaaacagtcccatgctggcaaaacagacagagcccgagtgggttctagatcggttgtgtgaaagcctgattcggtacgtgtcgactcaagagagtcgggctgtgggaggtggtgcagatttgtcggaggagccaactctgaggaaggagagggatattgggttggaggagtgattttctgttttattgttgtccacgggtacatattgcttgtattaattcaatgttagcacaggccccagggaacatattcttccaaaagaggaagtgggtcaaggtcacatgttggtgcctggatatttgtgtctgcctggagatcatggccacaccacgcagatagttaagagaaggtgtctacatacacgtaccgactgcacagctatatgctagatgcaccctccatccacacattgacatgtcttccttcatcaggccaagccacagtcatcatcaggcttagtagagtccccacatacgtggcgtggggctgtgtacatccgtccattcaactacactctgtcttacatctgccagcttatatcaacaaacaatatttctcccttcgctaataaaacccccatcaaatatgacagccaacatccctgaaatcctcctactatgcatggacatcgacttcataacagccttcaacgatgcgcttaaaacaacctggccagatcacaacccagaaaaactaaagatcaccccaataaacgagcgcctcaactccctcccagaagcaacaacctttgacctaatcgtctcgccagcaaactcctacggccgcctcgacggagccttcgaccacgccatctcaatgaccttcagcccgcgaaaggactaccacgctctgacacgcgcagcgcaaaaagtgctatatgagaaatggcgcggctttgcgccacccgggtcgtgcacacttgccgagttcccggatgacctaaagcagaataaatacggctgtggatgggtggctatttgtccgacaatgcgtgagcctggagatgcccgctgggaccgggaggttgtctatgagtgtgtgtggagcttgttgtgtcaggtcgaggggcataatcgctctgcggaggagaaggagaagattgggcggattcttatgacgccgttggctgctgggattgggaaggttagtaaggagcgctgggcggtacagacagtgctcgcgctgagacaatttgttgacgctattgagaggcctgcgaggtggggtaatttggggtgggagcatattgacgaggattgtctggaagttgagaggacttggacgttgtgagttgtggttttgactggccaagattcctatgggatggtgttgggaaatgcgtgtcaataagataactagctttgaagatatcccagagctatatctctcccactgtgcttctgtaagcgagccattccttcggttcggtccattttagctttcaatttgtctctaacattgcagtggagcggatggggttcgagggcgaagaatgcggctgcgtttcgctttcggtagtggtagcattgagagatacacaaaaggttacagttctgttgtgttgtcaagaggtgggattgagtttactacattcctatgtctcagtggccatttcgtactattgtctacataggtatgcatgtctttttgatacttccactttccctggccactatttaacaccaaagtatcacaatatttacccgccaaaaaggaggctctagccattccaacactttgccacagctctacggagtacataatagcccattctttatcaatcattgatcgacccaggcaaaactgccacggagcggggcgaacccacgcttggaatgtggcaaccaggcaagagaatcttggtacgccatgttttgcccgtttggtgaagaagctgtgttgttttcgtggtatgcagtatgcaatccagtgctggaaggatctgatacatttcagagcgcgggtacttgcaggatggggtattggcagcatttcccatgcgaggatcccttcctgtcaggatacgatggctgatttttttcgatcagatagaatgtcgagtcagcggagtttaaagtaaacactagtgtcttctacctaacttggtgtgtgcagatcagaggtttcacagcatacttgggaatttttgccttaagcgcataaagcgcccgtttttttttacttctgtaggaattacattctgtgtggacctcactcacagctcatatttagtgcaggaagcccgctaagatggagaaatacatacacccactggccaagaatcaaatacttgacctcacccccaagttgtacctagaccaacaacacacataagatgacaatccaattcccaatcatgccattcgactatttccaacccagcccagccaagaaatttgtctctctcaccaagcactcccgggtgactggggcaaaagtcaacacggtgtttcacgagctcaagccacttcagccagacgacttgatcggcgaatgggacggatatatccttgccacgggtcacccattcgagcacgagctggacacgctaaattggttcggcaatacattttattccaccgacgacgtggcaccactgatggttgcgcggaacggggaacgggtgccctttgaagattgggggcgtgcatccgtaagtcatttttctttaatttgtgacacatttccaatgctgcatggctatatgcacgtgtggttgtggttctcgaaggaagcttgtatgtattttgactcgggagatcaggtctgacattcttttcttgacagctacgtgaaatcaaatatcatggagttgtctctgcagctttgatttacgacgagcgacccatgatggtctattatcgagctgtgaagcataacatggtggctggatgtattgagagtaaaaagtggcaggggaaagtctacttctatttgacgagataagtagattgttatatttagtatgtagtccacaagtgttggcttgagtagggatattgcgtctattgcttgagcgtgattgtataactatatcagatttatgaagtggttcctcgccacggcagtctgctgttgaagattcaacctttgccaagcagcttggctacttttatttggccatatcagactgcataatgtaatgcagaccacccagatgtatcagtctggttcggatcgtacaccttctctaggagagcttttatattttcgcaatcaccattagcgacagcttttctgaactctgccgataattgattcatcccatccggtatagtcaggtgtcttcaattcactccgacgtttcctatattgcggatttggtaacccatttctcatgtccttgatcatgctctgggcactctgcatgtagtaaccaagccgttaatgggaggggaaggacaagtcaggatttatgggcgtgcagaatattcagggagcattcaagtgaataatgggccgaaggccctgaagagtaagcggcaagagggacttcgaacgaatgataaataaaatcatacaatagtgaggattcgctggtggtcaccgttcttacaccgtcatttaaaccacctatcacctaactagttaaggagcgcaagtttacatcatcgtgagtccaagattggaattcgcgatttttcctttgcatgttttacccaacaactcgcgaagaaatcagagttctatatcatggcgatccattttgtctacaatggactagaaaactttttaaatgtctcaaggggccaaaagctttgcgccgagcaggccggattcgattgattggcattttcagaagtcgagcataacttctccgggaggggatcgctaagaaaatggaccaattactgatagtcatggtggtagttacctaggtaattggatctaaggcggccattgcgaccacatctagatccatggatgtatccatggggttcaacctatccccacatcataattcactctacgcaaaactcatcgctgtccaaccactatcttcgaattgttacaatgaaggctcagacagggctagaagtaacccttctttcctcgtctaatagtctttccaatgttcggccaagtgaccttgagtcgttgatcgatgaagcgattcagacctgatgggacgcgcttgatcatcagagtcaaaggacaagcaaactttctcatctagatcctcccaaccgtcgacttatctccatttgactcagacgatgccatcaggcagtgtcgcgactttctcgtcgatgacaagcgatcaacactgtccattgtctttaagggttcgggactcactgcttcacggaacgacgaggacattactggaaaaggcccataccttcttgtggctacaaggttcatggggcttactgctcaatctacccggctcccattcagtagagaagacttgatgaacgtgcagcccgtataattatgcaatatatatgacacgccagtataaaaggtacctcgatatgagattatttggggcatctaccttttatatgagcatagatacctaattcttacaatttctgtttagtgggaccggaccgcgggacccaaagtcacctggacagtcaaaaactaaggggcaaatcagtcacaaggcacattccgacactagcaagaaatactgtttgaccggatggaaaagagaatcacctctacaatatacacaccgaggaatacatcaatcgctcaatgggcactcattttggcttacggtgagcgatatcatcttggtacaccgctagatatgcctgggattgaccttgtactataatcgcagagccgggattgcgctattatcatcagtcccggtctggagcagacgggtaatataaagaggatgtggttggctgtccttaattcagccctatccgatactacgccagtgctctccactattgcgtgctgactatttatttgttacgactttgagctcccaggcagcagaatacaagggggtcattagttgcaagatttgcaatatcatatcaagttcgccctgaagcagtcggctattctacctgtctacttgtttacgtgcagatcgaaaaaagacagtcggatcacaaacgccgaggaattaacttttccccctcggaaagtcgcctcgtgccgaccacaggaacgcgaaaattctgtcaggctttcacctgcgaacatctatcttttaccctatacgcacgacggagtacactttcatactcgtggccattcagaccctgtcaaaatggagaagacagacgccgcggctacacccgatctcgaagccccagacgtccctgccagagaatccagcctcgcccaacgatggaagcagaacctgacgcccactcacgcagactttgtctgtctgctcctcactttcctcaccggtctatgcgatagcagcgcctacaatgcgtggtcctgcttcctcggaatgcaaaccggtacgagtcatacccgccgctcccccgcaaagggggcgcaaaccccaaaccaacaaaaaaaaaaaaaacaaaaaacaaaaaacatccggaaacacaatagaaactaacaatcgctcctcaaaacaggaaacaccatcttcctcggcctcggcgcctccaatcaaccaactaacaagccatggggctggctcaagtccctcgtctcgatcgcgtccttcttcttcggctcgatgatcttctcgctcgcgatgcgcaccgtcggcgccctccgccgtggaaccctcttcatctcattcctcgtgcagaccctgctcatcatcatcgccgtcgccctaatcgaagccgatatcatcccccacacctcccatgacgccaccctatccggtggcccgctgttcctcgagttgatcccgatcgccctgctggctttccaatccgctggtggaatgacgtgcagtcgtgcgctgggctacaatgagatcccgaccgtggtcttgacgagtgtctactttgatattgcgtccgatccaaagatcaccgataagccgacgacgaacgttaagcgcaaccgtcgtgttgccggcgttgtgtgtctcctggtcggtgctattgtcggcggctggctgagtcgtagcagtggtggtatgcaatctgcgctatggatggctgctggtttgaaattcgttgctgcgattgcgtggttgttctggaaggctgcgccggcgaaatagattcgcacggctgttcagtgagttaccttgttctggtgttgtagaggtcgagtagattacaatttatagttagttgtgcatatatcaatgttaatagtttctgatcctggtgttctcgtgtctttggtattattcactctctctcaacgtccaatgtacttgatgtattatgttcaacaatgtctagacttcttcctggatatgcgggtggctgtattggctgttatcctagtggctacagtggtggatcaattcgatcccggagatgttgatgtcgccctggtaatggcgatgaccttcaatggtgttttgatgcagcttatcaaagattggatgaatatggaggcatcaatcagggctgtgtgccgagtgaaggtatattctgactcgatggaatctttagaatgaacactaacaatccatttttgcagtgttgaaacgaggccgagaatatcatgcaatgcaagaagtcatcaacagattcaacgctgagtttctgactcatactgtcttaacagttgtgcatcggttgaggttgatcaaccatcctgtgcatagtagatccgttttaaattccacaactgccattcagcattgttctcagtattttgaatcctgttccatatcgttgcccaatgcgcttctggtttgataatggcaattttttacatatcgtgagattcaaactagtcatgagttataaaggagacaaggtacatatgagccccgctacaggccaaacagtccaccgagtatgatacatagcgacagaaaatcgactcgtagcattagagagatcaagtaagagattagcagaccttcaggccatgaatgaccatactaaaaataataaagggattccctttcttaactcaagtgggcttgtgaatagttaatgttggtgagagaaggttatgtgacgcatgatcaggtacaaaatgcaaacccttccttgacgacggaagatgcgtatgcaatccaatacccgaataaggaattccgtgtcttgaaggttttggaaaccagtcatgcgattactaagtgttctggggattttgccgtggttgcccgccagactcacggctaaatgttttgccggagatatccccagcttcaccaacacccggagccccgcaaatacatgtacatgtacggagcagtatgtacatacatatcggatttgaggccgaggtcgatgaatttccctttgcgtttagtgctcatccccgctttttgacaactgtgaatttcccgcgagcgacgtcaccacctgagcagcctcgtcctactcccgaggtcattgagcagcacttcctaggctgattactccattggcttgggaactttctcactgcacctcttttttctataaacatagagcgatacttacagcggtctcgtacgctctggtttcaatgttagccttctctggatatggcggggaaggtgggggtggggacgggtttagatggggattgtcgccatcttcaggaacagccgttggacagtgggcacagtatagccgagggtaacttctacatcgatgtttttcggaagtgggcgactttggatggggactttctaggtgcaagagcgatggaaaaagcatggctgaagtgctctaccccagctcattccgaagactgttgggcgagaagttctaccacgaattggatctcagcatctctgttcctctgaagctacgtttgacatcatagatcatatgagaagttgaaaactaatgtgacaacataatatccaatcggttgtagatggctatagcaggtggcgaggcatttataacggcaatagacggatttcgatatccacttcaaacttacttggtcttcaactatttcttcaagaatcgtatcgcatatataaaagatagcgttgatctttcgagataagtcacaaaagtatattctcaaatactcttattcaagttcaaaatgactgtcaccacaaacggaaccaccttttcccacatctctatcaagcctttgcaccggactttcggtgccgaggtcagtggtgtggacttttcggctcccttgacggatgaagtcttcaaggagatacatcaagctataacaaaggtatgccccacattgctagcttccattatgcggtcttcgaattgacagtgtggttacaacgcagtatggtgtcctcgtcttccgcaacaccggtctcacagatgaggggcatatcgatttttctaagaaattcggagagttggacgacgtgaagccatatatcagcgctggtcggaaacaccgtctcaaatacgcagagctcttcgatgtcagcaatgttgaggccgatgggaccatccttgaccccacaagcccacgttcccaagcaaacaaggtaaatatctagataatgatcgaaagaaatatctctgcataacagttctgaccatcacgggtacacagggtaatgacctcttccatgtggactcaagctttaaccctcgccgggccggatactcccttctcctagcacacgagctgccacctagtggcatgggtggccacactgcctttgcagacacgaggacggcattcgacgatctctcgccggagcttaaggagcagctattggccaagaactacattgcttgccactctatgcaccactctcgcaaaaaggccgcccccgaggcctttgccgggatcaacccgctcgattaccctatgggacggcaccaattggtgcagcgccacgaggcatccggtcgtatgaatttgtaccttgcggcccacattcaccatattgaagaccttactcccgaggaatcacaggcgttgtttgaccagctgttcaagtacgcaactcgcaatgagaataccttggagattgagtgggagcaaccgggcgatctggttctttgggataatacttgcactatgcaccgggctgttggagggcctttcgttcggaaatacaagcgcgacatgagacggacgaccgttcacgattcaagctcgacggcttggggattgaatgagcacactgatgtgaggcaaggacttccttgaactgttgaaaatgtagcgctgggatatccatggcttgtatgaatcattgtgatgttttatatgttgatgaagtcactcttttttgtgttttactctgtattttctgaacattaagtcattttgagacataaattgaataccaattgtttcgcttcgtcctattatgccttgtcataattatagtttttaattaatgcttccattcttgcacaatttgcaaggttcaacagttgcagcatacagaatctacgtgtatggagacgaatcaacctaccgcacgagactgaaatatgatgttctttattctagcaattatagaatgctgctaatactcagcgcgatcctagaaacttagaacgatgcataaaccattcaatgcaaaaccgcctattctatcataacaattggccatgacgattaattgaatttgactacaaagcaccgactcagcgccatataagacagctatacattgcgaagcgaagcgcataacatttaggaggggcccttgctgagccactatacctagaaaaagttgctaactacgcccccgtgtatactgattatttcctgacagttgaaacaagggtctgaaaccctcttccatgtctctccacggagagaatcctcgtattgtgcaggccgcaggtctttacactgcaagtaaattccgtgaacgttgcggtttcctatgctccagcttccgagaaaatgaacccaagggtaagtttccgcgcagttcccgatcttttgtgttaatatccttgttgtgctcacgcgccggggttttctggtatgaccatccccgcagcgtgagttgttcgcctgcaacaagtctgtataaaggaggcgatctttggctttctgagtcttggtgggactgtgataaacacgacggagttagtcgagaattgtgttgaaatcatacacgctggaatcgtgtgcgatagcgagcttgggaaggaccatggcctgaacttggcttgcgagttgaggtagacgcaataggtctgggcggtagaatctccgatggctggttcatcgattgtaagctttgcacgatagcggcatttcatgtatcgtattgcttgaggcaaggagagatgaagaaggatggattctctactacaattgagatcgagcttgtttaatagccatgtgaagcctgacaaaccagacatcagcatttgatcggcacgtaacctccacagtatctcactgactgaccggtgaatttctctggatctagaagtgaagactttggacatcttgcttgaggggtaggcaaatgttgaacctgaccctggagagccgttgaaggttttggatctcgcctcgaaggttgtcaatggtagtaacatgccaggtcttgcaaggaagagtgcatcgaattcaaaataactaagatagtaagaaagaagaagcgagctgtataacgggaagcaaccagtcaatatagctgaccactttgcaaacgtttcggcaatgtgagataagattaaagctaagttctaaactataaaatccgacagtgtcaattcgcctcattcagagaagctcaaacctctaccacgaagctaattgcgaggactaagtagaaatatttggaagttatggaccaacctaggtcttaagactataagttacagttttcataacgctgatgcaagtcatctaagataaagagttgcgccatttactccaataccaagtactgatgacttatgagaaaggaagccatgttgtattgtgtgtgtgtgtgtgtgtgtgtttcctaagagagagaaaagaaggaagattgaacaaggtgggggagcagttcctatcaacctaagaaacggtcttaacaagtacacgactttaaatctaacacgacacgaccttgcaacttgccgcccttcatctccgcaaaggcatcattgatgttctgcaccgtctcaacacggaaaggagttgagactacccgttttgccatagccagggtttccattgcctctcgacggttgccaacagtgcttccaacaatggccagttgcttaccgaccatcgcgtgaggataagcgccggcaatcggctgtggatcacccggaacacctacgcacaccagtgttccattgaacctgagatatgatagggcttccgcatatgcagcgttgcttgcgctgcaaatgacggccgctgaagcgccaagcccaccagtaatggccattatttcgtcagcaatgctcttgcttccatcatcgaggaacttggtgacatcgatgaaagcttcggcaccacactcctttacaaaagattccttggctcctatatccaaaccgatgattctgaatcccatgcctcggcttccgagctgcactcccaggtgacctagaccaccgccggctccagtaattaccacccaatccccggcctgggctctgctcttcttgagggctgagtaaaccgtaacaccgccgcaaagaagcggtgcagccacctcacttgccaacccctccgggatcggcgtcacatagtgggcaggagccagagcgtattcctggaatgtaccggggcatgtatagcccgagatttcggagttcgcgcagatgccgtcggcgccagccaagcaaggcatgcagttgccacaggcggaggcaacccatttgatgccaacacggtcaccaatcttcactccggaaacctcacatgacggtcctagctgggcgatgatgccgacgccttcgtggccgccaacctgtccgctttttacaggctctggaagccagctccactaatgaacgagattcagtcaggcaaagcatcccacgaaatttctgtgaagaaagattggtcttactgtttttgtcatgaggctgagatccgaatggcatactccggagtgagtactggcttgatgtcagtgatattcaataacgccaatgagtccaacttacatcttgacgaggacttgcccagggcctggggttggagtatccaactccaccaggcgagtggagatctcgcccgggttgtcatagatcaagcctttgtgggttttggggacttccatggtgagaaatgtagacttcggagaggataatagtagctaacgaaggaccttggtggtgtgaattgggaagaattgggaattggttgttctttgttttatagatgagttccgttcgggacccacccccgcaatcctggggaatccgagcttcgtggccatctgtttccatctccagccgtcctcgaatgtccgcgttcacatggccatccgtacctacgtgtcggctatagatggcgcgcatactaacgggcgcaattcgaaattccgctatgagcgaggattgcggggcgatctattgggatctttggaatagataaatacggcaccatcacagcaaaagcgcacatttatcaccccaagccatatcgcacaaccccttacgaccaagtcaaaaagaacccagtcatacacgatggccgactcaaccctaaacttcgaaaccttcttcaacatagtcaatggcgagagccgagtctccgataccacgacattcagcgttgatccttccacggaatccaagctatggagtgtgcccgtggcctccaagaatgacgtggaagatgctgttcgctctgccaatgaagcattcaagtcctggtctacgacaccctttgaggagcgagtgggcaagctcgttcagtggagacagctttacgagccatacattgaggatttcaccaagctactaatggcagagtgtggcaaaccccgtggcgtagcagccggcgaggcgaacgaagttcttgctctgtttgatcacaacgtgcagcttcgcattccggaagagaggctcgaagacgagagccgcatcgcaatcactcgtcatgtccctgttggagtcgtcgctgctatctgcccatggaatttccctctcgtcttgtctattggaaagatcctgccagctttgctgaccggatgtacgatcattgtcaagccgtcgcccttcacgccgtactcggcactcaaatttgttgaactggcgcagcaaatcttgcctcccggcgtcgtccaagccattggtggcgaggactctattggcccagcgctggttcagcaccccaatgtcaacaagatttcattcacgggatccagtgcaactggaaagagaatcatggcttccgcagccgcgacactgaaacgtgtgactcttgaactgtgcgtataattccctcgcacggcactcgaagaatatcctgctcacacacaagattttctaggggaggaaatgatccagcaattgtctaccctgatgtggacatcgaaaaaactgcccctgaagtggccatggggtgcttcgtcttctgcggtcaagtttgcgtcgccaccaagagagtatacgtccacgaaagcatttacgagccattcctgaaggctatggtggatgcggtctctcaaatggaggtgggcaaggctgacagccctagcactgtactgggtccgatgcagaacaaaatgcagtatgacaaagtccaggacctggttgccgataccaaagcccagggctacaaattcgctctcgctccgcgtgcgatagaaggaaaaggctactacatctctccaagcattgtggacaatcctcctccgaccgcacgaatcgttgtggaagagcaatttggttcgttgatcagtcccatgggaaaaaatgaacatactaattctgctgtgtttaggtccaattgtgccagtcctcaaatggtccgatgaaaatgatgttatcgctcgcgccaacggaacgacttcgggccttggcgcatccgtgtggagtggagatgcttcccgagccgagaaagtagccaagcaaatgcaggctggaagtgtctttgtgaattcctgggcgaaaaccacgcctcgggcgatgttgtctgggcacaaagagagtggaatcggcggtgaatggggctctacagggttccttgagtactgtaacacgcaagttgtgcacttattcaagtgagttcaggggttttaactagtgtttcgatgagtaattagctcggcatagccacaatccatagtataggaatagcctctgtcattgaaaagggtatgatctagttggctcaatagtagtctttttagtagtctttttagggttctctttgtgtacatatatcttctccccatcccaagttttgtaggtactagacagaaaaggatggaaaagggtttaatttgtgaaaaccacttttttgtggaataccgaactaggaatatcgcccccttagaccctaggcaggaaccgaggtctttgttacggtctggtaggaatatatattccacatataagcttggacatacgcatgtgacgtatagagtcccgtctattaccgaaccccacagattttgcggatgcggggttaatccggggaataaatccctttttcaaccctttctgcttcctactccttgctatctgtaaatctcatgcacaatgactcgtagccaaaatctccgtgtctatcgcgcgtgtcagcggtgtcgtcagcggaaactcaaatgtgatccgtgagttgtacacctcagtcaacctccgctctcactaacatttttcaggtccaacttgtccgaagggacaaaaccttcttgcgtacagtgcctccgttctagcaatgagtgcatgcccgccgggtcacggcgcggaggcgacttctcacggtttcgacgtccatacggggaccgaagctctacgccaacgcgggctaatataggccacggactgcatgacgaacaaaatagagacgacgaaaaagtaatggatgatcccatctacgctgagttaacaaatccgggtgatgcgctccagatccttgcccaactcgccgcgaacgactcccaggttcccaatcaccctaatgactctacgaccttcgatcctttcccggtgactccatccacgaagcgaggggggacggataccgctttcaatattaatggtccgatcgagtcgattcagcctcctgtgttacagtcgacattgtctgagacagagacattggtgatcggtgtgttaggcacagatactgtttgccgtctaatacatcagtatgaggccctttatattccgtgtgcgatttcccttctgacactttctagctacgcagcaaattaccacactttttgtcccctcgccccgaaacggcttctggcaacaacggatccgcgcaaggcggcagtagatgagccgttcctgctgacagtgcttctgaccatcgcatccaaagacgagcccgcatataaggatatccaccaacattgctggaaatatctcaagcggcacttgttagatatactcctcgccacgccatctaccttaagggtcgggtctgtcgaaggtctcctgcttctctcggagtgggtgccttatatgcaactcgatacctgttcctatcctaatatgttcccgaggaacctgagtgccgtcgaggataatatggcctggtcactcatcggccaggcggtgagacattcttatctcctgcgtctagacaaggcatcctttcgggagacggctcttggggagtcgcaagaactcgagaatcgaaaccttctagcgtggatatgtgcgttctatagattcctgctggttccttatcgatactgactagcttagttgtatatatcgccgaccgacagatctccgtccgtatgggacaatcattctggtctcgtgggccatcgctctcgacgaactttacggccaatgactttccaactctacgtctcagggcagatgcagagcacaaatatgcacatgtgctacaggctactattgagctcacgcagcttcttcacaacgtgcatgacactttatacgcgtccaaggagcgaagaactcaaatggttcgaagaggagactacaatcgctacctagatgattttcggcactccatgtcggcgtggaaagaccgttgggatggtctcgagacatctcccaagctgcactgtacaatgcatatcttcaaggagtacgttcgattgtacgcaaactcattttctttccagtcacttctttccagggcagctcatcacagtcgccctgcgggagaaaaccgggcaacaacttcagggccaaagagagccccctctctgtttccacggggcatcatgtcgaccgcagagggtgcatatgtgctcgaagcagtggatgcagcccgggcgatcctgacaatagttgtccagacaatttctcaggcgcagattcgctatatgccgttccgattctacatgtacgtatcactatcaacaatacggattgtctctgggaatggctaattgatcaataggtatactgtgtactccgcggtgtttttatacaaagcggacgtctttggagccgtcgtgagcacagaacataccgaagtcgtcaacttggtgcaacattttatacaagtacttgaagaagctgccattagcgattcccatattgctagtcggtttgcaagtttgttaaagcgcatgtggctcccggacaggcagtgccattctcccaagcgcaacacatcttccaccgcttcgaactatgtaaatacgtcgtcacagcagtgcgaactcccccgaaatactgatttactcgacgacggggctcgccacgatcttgcttctagcatgcaggttcctgagcctgcacaaattcccacgccatatttcaatcttttttaccctgaattctcgactttagagtcagagctggtcgaattcggggtaggctcaactaacttcccgttttgaagccgaatatatgggtggatgttcataatttcacaggcatggaaagccaaatctgtcaccggatgacagaaataagtaactaacattgtatgggagctacctaagtagggtggtaatatcaaattctaagaaatcatgaaattgtcaactttgtagtcttagagtacgctcttagcctttgaaaccatcaaccagggtagttactagctagcacaatcaaggcagttcgattgccaccagaccgatggtggaagagggtactatccataggggggatcagacctttgtggcaaaacattatgatggcatatccatacatctagaattacctcagaacaaccatggcccacaagtatgaattgactggctcacactgagtcgacctcgggatatatcgaatcagtggcacaattagatacatctgaatggcaagtgcggagaaggacccaaggtgatggtaaatatcatcgtcatgatcaaatcattgccaccaccttcgatacacataaatacgaacggttctccctaaattctagaggatataccaaacaaaccgaaataaatcgacataataattatcaatttcttggtatgcttccactttgacccttttccttgagatgagcatcgggagttgatagtggaggaggatgcgatgctctataagaattcttactaacattatcaagacatcatgcctaaggataaaggtcagaacaagggcgagttagcttccgactccagagctaagacccacgctacggaaaaggcttcccacagcgagatggggcctaacgaacttttgagtgaacacatggactctgctggtaacccagtacctgatccaagctggggcacaaccaggccacctgaggaggatgaggatttgtttgaggctgcgaatgcagacacttcggaatttaaggattaatttgggatggaaagggggtttttgatgggcgaaagttaaataattatacaaattattcttgaatttgcaagctatctactgcaggtttcaataactacatgtgtgtctccatgtatgtttcaataggttccagtacaacataagagactaagtacatatagtggagttcgcgggctcattgctatggcaacacaagttatagacggtgacacttcgtagcgtagaaccttggaaatatcatcttgttgctcttatttgtctgttgtcgaattcaattgcaattgcaatttcaattccaatttcagcttccgttctttctttttatattacattctttccaccgaatatgactctgagctcaagtgtgtttactatgaactgaatctcccaaggaaacaacgacagtaccgaccccctccctttcactcattcctgtccacatattccctctccaatctcttattttcccctctcaaatcctcatgtaatcaatcttgcatgtaccactctcttcttgatcgacgacgcgacgccgtcaccgcttgtgtgcagctattaagcgacaacaataggaacatggcgcttgacccgcgcttctatcaacacatcggccattcgggcccaggctcgatatcttcagccgcttcatccgtcatatcggccgccacagggatcacctcacctagcattatctcgacctccgcttccgccgccaccctccgatctacagcttcaagtccttccttccgcgcgcgagacgggttcccgatatccaataccagagatgggatggccagcccggcaccagggggaaatgtgcgtgtcgtcgtgcgagtgcggaagttcttacctcgaggtaggtcttgtttgggagagctgcggggtggcgcggtaccccgaaaatagagggtgtgttctgacctcatcttgcagaaatcgatcgcaaggcagaatgtttgatttcgatggacccgcgtacgcagatgacctgcctgcaagcaccgaaaccgaaacccggcgaccaagggaaactcaagtcccacgcccgtggcaagatcttggaggataaatcttttacattcgacaactctttttggtcccatgacgaggaagatgagcattacgcacaccaggaagatgtgtataatgctctcggtgaagagttcctggatcacaactttgaaggataccacacgtgtatcttcgcatacggacagacaggttcaggaaagagttacaccatgatgggaacaccagataggcccggcttgattcctcgaacgtgtgaggatctgttccagcgcattgagaactccccttctcctgatatcagctacaacgtccgagtatcttatttcgaagtgtacaacgagcatgttcgtgatcttttggttccacgaacagatccaccgcattatctccgcattcgcgaatccccatcggagggtccatatgtcaaggatttaaccgaggtcactgcacggaattatactgaattgatgaagtttatgcgaaagggcgatgtctcacgaaccacggctagcacaaagatgaacgacacatcgtctcgatctcacgcagtctttaccatcactctcaaacagatccaccatgatttgtcaacagatgagacgactgagcgcactgctcggattcggttggtcgatttagcaggttccgagcgtgccaaatctaccgaagcaactggcgctagacttcgtgaaggtgcaaatatcaacaagtctttgactacgttagggcgtgtcattgcagcgcttgccgatcccaagaaactccgtggcccacgaaagggcaaagaactcgtaccataccgtgattccatcctgacatggctactgaaggacagtctaggcggcaactccaagactgcgatgattgcctgtatcgcacctgccgactatgaagagacactttcgactcttcgttatgcggaccaggccaagaatattcggacacgggcacgggtcaaccaagatcaaatgtcggcagctgagcgtgatcaacagattgcggagatgacagagacaattcgcgccctacaactcagcgtgagccaagcagcagtcaaccagcgcgcaagcgaggcctccgatgaaaggctcgaagagtaccagcagaaagtcgagaaaatgcaacgcctcatggaggagaataagatggtcagtgaatgcaagattcgacaactgcaaacagaaaacgacgctttgcgcatgcatttgaagctagcggttgagagtctcaaaaacccaatcccggccattaccctcgagcagcgaaaacctagcattgggtccctgcaagatgagaatcaaccgcccagtcatgacccagaagaccgtgaaggctctcctttagtatcagatgccgaatctgaaatagacgtttgggaagatgatgatacggtcaccgatgatatcaccgacgaagaggcccaacagatgcaagattacatgcatgagcttcttggtgacctgagtgtcttcaagagaaagctggccacggaccatgcccgcttccgtccaatcgaggagcatacgactcagaaacgccgcgccttaggaacccttgtcagcaatcgttaacatgtgaatacaagtttatttttatcttttgggtgtacagggattgcatggtgttggtggcgagctctttgtttgcacttccttgtttgaattaggcccagactacttttggcccgtgtacttagttctttgatagcgaaccctgcgatgaataatgagacatttgacgttatgtatgtttcaatgctagctacctcattgattgggtatcaccattctttcaggccgcattcttatatgaggctatgtccttcaatcagcagttgtaaattatttctgttcagtatctaaccgaagccaaacgagaaactgagaaaattcaacgaatatagttacgctgtttattgtatgcaatgaaccgcaagttagggctgcgccgctcagtgagccgcttatggcatcatttcattttgcgtgagtcaaccctccctcctccccaccatcttcgcagaaccacactcacacgtgaattaattcacagacaagatgacggaaccctccaattcagtgccgaccgcgcaagtcttaactcctgcctcgtcagcactagagcaatctcaacccgtgaccgaaaactctccgcagactctcccgatccgcgactcaaaacccactaaacccaccggagatgcgcccgcgtccacagacggcaccacagataagccgcttagcccagccgagttgaagaagaaagccaaggctgataaggctgcccgacgtatccgagagaaactcgataaggaaggaggcaccatcggtagtgccattcccactcctggtgtcggcgcccaggcgcgttcaccaactacgccgaagaaggatgccgctggtgctggctctgcacagaagggaccccgacctcttaccccgcgccgtggctcaggtcccctcgcgcaaactgggtccgttctcgtggagcaaaagaagaagaaggatgataagaaggttgctgtcttcggccatttgtatggacaacagcgccgtgtcactgtcgccggtgccacaaaggaagtgcaccatgccatcttggccttgggtatgcagttgatggactacactatctgcggcagcagtgcgcgctgtgtggcaacgttgattgcttttaaacgagtatgttgttgttcttctgtttcatgctggtaagacatgaccctatactgacaagtcactttctcaaggtcattgaatcttacacaacccccatgggcacctctctggctcgccacctcaccacgcacctctcgtatcaaattacctacctctcgacatgccgacccctctctatcagccagggaaatgctatccgtgccctgaagctcttcattgcaggcattgatccctctacccccgagacgagtgcgaagatctcactctgcgaatacatcgacagctttatccgggagaagattaccgtcgccgaccaggtgattgcagacagcgcagcacagaaggttcaagacggcgacgtgatcgtaacatttgccggcagcagcattgtcaagcagacacttttgttagcgcacaaccaaggcaagcggttccgtgtctcgatcattgactcaaggcctctctttgaaggcaaaagcctcgcccgcgatctcgccaagagcgggctcgacgtccaatattccctcgtccacgccatcacccacgccgtcaaggatgccacaaaggtcttcctcggcgctcacggcatgaccagtaacggcggcttgtactcccgcgtcggcaccgctcttgttgccatgtccgccaaagagcgcgccagtggcgtcgaaatccccgtcattgtctgctgtgagacgatcaaattcaccgaccgcgtcgccctcgacagcatcgtcgtcaatgaaatcgccgacgccaacgagctgctacccttgaacactcctgtctccctcgtcgttcgcgacccggcagatgcgtatgtcccccctccgcctgagaataagaagggtggaaaccgcaccccggttcccgaacctcctgttaccccgcacaagacctcttcgtcgcctctcgcgaactggcgcaacactcccaacctgcagctgctgaacatcatgtatgatgttacgcctgcggaatacgtcgacatggttattactgagatgggcagtcttcctcccagtgctgtcccgattgtccaccggatggtgacaaacctgtgatgtattgattcttcgcttttttttgcaacatggtcatgaatctggagcgtatcgaacctgtaatctaaattaaaagcaatgaaagtggttccgactgcttaggcgtcatgatttctaggtctgttttgtctttctctcttttatccttgttttccgtttggaatcctcgtgggtcagcatttgggctggttggtctgattgtatgtgtatgtttttcccatttcttacatttatttactcgttggaattttattttagaacaggatgaacagacaataaatctctttatgtacattcggctttggaatacggaatacttggttcccaatgtctataggattgcagggctatttgtacacgccatcaggacatgccgtgggaagtgtttagatgattaccccggaaatggacgcttctctatacaaactcaaaaaagcgccacaaccatagatttgcgaaaaataaaccgcagcttgcaacaatttacatacacatacgaattaaaaagacaaaaaagaaatcgacagctcagagattcgaactctggtccccgaagggactcgcttagcaggcgagcgccttaaccactcggccaaactgccaatagatgatagtttgccactcaataaaatcaatatttcataaggtcaacatttgcgctacaaagactataagttagatggtttacaggttagtggatgtcatggtagactatgaaattgtgctaataattttagggttcggagctcaggggtttatcacctatacggccgtacaatgagacttcaaccgtaacatagatatgtgagataggaaaagaaccatttatagtagtcgagtgcaacttttcaacatcaattaatctcatcacgatctctgaatggccacccctttctcagtagattaatgtcttctgtgtcaccctccgcagtagctattagggaactctcaagctcggcagacttccgaacagcctcttcgaaatgctcattgctgacccagccatcttcacttgttacttctatctgctcccgccaatgatccacaagtttgttgatattaaaccatagttgctcctattcatagaagccatccagctccgcatcggtgaatcgcacaggacaaggtattcctatatcagacaggtggggccagtaatcagccatgaggactaatgcccctttcagtgtcatcaagtttccactccattgcctgccggccctatcaacaagatgctggcgaggaaaaaggatgggatcacgaagagcttcgaggtgcgccttgttcaggtgaccgttaaagatacgatagtagtaagagatgagacggcgtcgctggagttcatcagcttcgaattttttgtcagccggaagcattccgtattccggtggaagtgatggttcttcaagatgaggggttttttctgcatctggattctcgaatgtacgggggtagcctgcgaccagcaagcgcggctcaactgtcgtatgttgtcagtcaatgatacacgaggtggcgccagaatcgggggaaacaaagatgttatttgggttcaaatctaaagatcgtcaggttttgtcagtgatgactgtcaatgagacgtacctgggtggcggagagtgggccgattaagtgaactgtcagcaacctttggaagtaggtatgatgccaatgcaatgtacttctccagaagacggaggtaatcctcgaggtcttttttcccagggaagacatcattgtgcgggaaagcaagttctcacggcttcccgtaccgctgagtccattcaatttccttctgtgcgacagataaaagataatcttgggatcgttccctgtgatgatcaaaatctgaacttcaaagtaatgaaagttacactcacatggaccacagcggagattcagaccggcccttccttcataccaaaacatataatccgcagttggaccaatgcaaaatatctccgagtcttcacatttttcagtgctcgctatatatagcacagcttgaagttcagcgggaacatctttcttgaaataaatgctcccaatagaccggaagatcccattataatcgacttggttgtcattcaataggaagttgggggagttcaacaacacaattcagacattagatgacagagcgggctagaagttttaatgtagaattaaaccactcatcgtccaagagctattgagccgaatgtctatccctaggatcaaacttcgtgatcttacgaatgaactttttgtcctcagttgagacctcgtttgttgaaatatgtcaaagggcatctgcttcccatgaagacggctcataacctgcataagcatatataacgtggaagggggtgcgatttcctgataagaaataggaaatggtccaaagaactgacattgccttgtaggaatcttatgatcatattcatcatgatcagctgagacatcgggcttgaacatgaagtagttatcgccatatatcaatgtgatgagctaataatatacgttagcagggagacaatatacgggtggttgttacacgcattgcacacataccattgtaccaaacgaccatatatcagttgaaataccccagccaattcgaagatgagcctcaggactccgccatatgggtgcccctatgagattttcatcgtacgcatacttggaagtcgcagggatagtacttccaaagtctgcaagttgcacatcagtgaagcttacgccctcaacttctgtgccgtagttcacgagaatattgtcctgtttgacatctgccacgatatagtcagattagagtctgcgcaaaagttgcggtgatcatatattgaccggtatgcacaaatccgccttgatgtagcacatctaatgcttgtaggactcgtctagcaacttatttgatttccactttgttttaagcacatatcgctcgttttctaggcgaaagtggcgaacactaatgaccactatttggccgatttgagacctttcacaattagccttttttcgtagactcgccgggctgatatccgcgcaccttgccaaccagacacagtcctgggcatgctttatagtattatacgaggtcactttgcccttcaaactctgaccaagatggaataatgcagacattttccttcgactgtcgattagttattcaggagaagaatggagcaagaaatatcgcagcaactctgggaaacaaggggcgttgaagtctcaccggctttcttatgtcttatgttggccaccgtcggggtcaagatcatctagggttaaagttaagtaagttaacatttgtcttcacaagacgagagtcacgagacaagccgagggtcttaggtagatgtcgacatgattaaaatgaggcttattgtgacgagaggctctttgtcgacgcaacgacgatcctttggtaacaagctgccggcgcagaacgtgtacagggcctggtacaatataaacaactcttctccaagcactcggacaagccgaacagttggtgaagcaccatttgggggtagtatgagcccaatgacacagtgcatctgtcatttgcagaagcgtagtcaagctactagacctcaaaatcataataagtatggtgggtggttaaaaggaatatactagtacacggaccacccacctgagctggagaaataaaagtggacctgtggcggagacccactctcggattatatataatactatatgcgaggtttatccggtggtgatgagtcttgagcacgccgcgaacccaggggaacttgtacaaagtaagtcaagagataggaccaccagtttggaaaataagtcataaactacttattgtaggtatcaaggcagatgatatcattttcgtagagcgaaaaaaaaaaaaaagccgattgatgataactgttacacctgctcattttattagggagatacgaaatcaggcatttacggtcatgtacatgtgtccaactaaccagccttggaatgtccaattaattatgtgtacagtcaatatttgatcgttctgttatatccaatcataaatgaggtttatggtcaagggcaggtcaaaggagtcagtcctatggatgtatgcactgttgtcgagatcaagagagtaaacaaaggccgtgttgtaactatatggcacttgggagcagttttgagggtgaatttcgctggctgtagatctgagatattagcctgccggtattgctggctccaaatttgctgtgtgtgattcagtaattccctggcagatatgtatatatattttatttcgagacccacatactgcacctcgtgggagtaatcgactctagaaagatatatggcaccctttcaaccacctgccaccagagaagtcggcgccgtatgcggcttttcctcgatgaaacgttctagtaatctgatccaccaccaagatgacccaagggatgttatgcttagattcttcgacaacgcctttctgtatgtatttgttggatgttaccgcgacccacctatcagtatcccagttaaaagaatgaagacaatttatctgtaggtataaaaacaaaaggaataaagattaggtggcgtaggaccaaagagatctcgacaaggcaaacgaagtccaggtacctctatccctaccgacactccggttgggagcgtattatcaagcctgtgatgatcaggtttgatgagagctgatattaattgtttagaaaatagataactacaactttgcatagtattacgacacccccattcgtcgcatcatctggaaactacctatactttcgtggaaagccctaaaatgagtatttaaatctatcgactcgaaaatgcgagaaataaccaaacacttgcttccaactgcttccaatgaagtagttaaactaactaatacttgctttattaactagttatcggtcataatgatttatctcggataaatgcaatatctatcttgttgggtggcaaattatcaccaaataggcagtttggccgagtggttaaggcgctcgcctgctaagcgagtcccttcggggaccagagttcgaatctctgagctgtcgatttctttttctttttttttttttccccctttctttgtgacacagaagacattaatctactgagaaaggggtggccattcagagatcgtgatgagattaattgatgttgaaaagttgcactcgactactataaatggttcttttcctatctcacatatctatgttacggttgaagtctcattgtacggccgtataggtgataaacccctgagctccgaaccctaaaattattagcacaatttcatagtctaccatgacatccactaacctgtaaaccatctaacttatagtctttgtagcgcaaatgttgaccttatgaaatattgattttattgagtggcaaactatcatctattggcagtttggccgagtggttaaggcgctcgcctgctaagcgagtcccttcggggaccagagttcgaatctctgagctgtcgatttctttttctttttttttttttccccctgtcttatacctatacttgaggagttattcccccttctcactttttatacatggagccatttccttcttgcgatacgtggatatgttttctaaagccatataactagtgattaccttggatgttgtcatcgaaattgcacacgtgatatgagcggtgtacccaagtgctattttgccgtcaacaaccgtcaacatgccgataaggcattgtgagcctcaacaagttcattggcaagatattctcacatctcttaagatccctgttagcggatcaaggatccctcaaaatggtaaatactgaaccctactctcgcctagaatcccctagatagtccaccaattcccaagctaacaccaaaccaccagagcaaagactcctccgcctcatacctgcacatgcatcagccgcggctagcagacctcttcgaagaatttacacgcccacacacctcaacagctaccaactcaacaacagacccacacaacgccaacagcgcctccgctgcaaatcgcgaagcagcaagcacaaatgccataccctacgggtcgacctctccctccacaatcccctcattcctgccaatagaagacatctacgtggcaccgcaataccagcccccgaaccctgaagacgaggatgatgtcgtcccagaccagcatgcggcgttcggcatcactcgcgccatggaacggagacgagaggccgtgtggcgcgatcttggtctcgaggcgcttgttaacggcgaaggatatggacctgatgctgggcctttgactggtgctggaggtgctggggctgcaacctctgggcctggggctacgctgcggggtagtgggggtggtgcggcggccgctggggcgcctgttatcagggtcagggattctgggcggaggatgggtggacgtagggttattgggttgcggtaataggcatcagtgtttactgagccttttgaagagttgtcttttattgggattgttgctgcgaaagccaggcgggtaaatggctgtcttgtgttgcattttttactggagcagattctttcgggctggatagccttgttatgatacccacgttggatgtatccttctgttgttatgatatatcttgaagatcattgattcgtttccgtttgcgatttcgttccaagaaccgccaatatcaaatggctgcagatctaacttggtctgagccttaaacgccgcgcgtaatgcgatatgattatacattcccctagatacgaatgatgtcgacccgagcccgctcgtacagtttgtggctcagttgtttctgttcgcgctcgtcctctgccaacagtcggggatggacggccatttgggcgtatgagcccgcggcgcgacgctttgatagggtgcccgggttgatgactagcacactgtcgacgacctgcagaaattataaggttagcaccatcatggaaggtggaagtaaaaattttcggctggggataacatactttcacgaaaggcggcagcatgctaggcacaattagaatatcaggccggacattccaccactcgcctagtttcatgtagggaatatccagcatagcacctgtagccatgccaccttcgaagccgggctttggaagatttgaccgtgcagtcggagggaacaaggggaagaaatggcgttgctcgatgagatacttgggcagacgggtgagcaggttaccctctgcgggtcgaccatgcaagacctcttcgcggcgaagttcggaaagcacatcgtgtgagcacattccaataacgcattcgttgaatgacaatgtggcgggattcgagacaatgcggacctgcttagggagaccaaggtccttcctggggagctgctcctggggccaggagacgtgtcggctgagtacatcgcggacagacggaaccagcacgatcgtgatgcttgggacagctgctgcaagtcgtgctagtgacgttgagatacagtgccggaacattagggacattgtagctgtgtccggatcgaggcccttgatgtctggcaggtcaaaatcgcccgatgcaagaagagggtgctcgatgtccaggaacggtcccatcagcaccagactgtcggcgtagttttcggctgccttctgacatagttcctgcagtggctcgaagtccagattgtcgtccgctgtgtagggaccggccgcaaccatgatattaagcggtgggtttgcatctccgtcaagtcgctcgttgatgccgtctagtaccatagctgaagatacggccggtggcatcaggggaattgggagcacttccttgacagtgaaatattcaccagaagggttgattcctcggagagccacgatttggcctgggaaaaagttcaccgagggtacggaatccaccttcaatgggactcgtctgccggctccggtccgacgcgaagtctcaagtacgagggatgccgggttcagttttccctcgagactgtcggaagcgatccgcccgacagcaataatctcgcttgtactctggatagctgcacttccaaatgtaatatcgtctgaattgaattctgcctggaatatagtcgcgaactcgtctatacgatcatccagaatttccgatgcttctgacaatttcatgcccatgggcttgtagccaagctttttgaggtccgtattcgctgttggcttgatgcgcgcctcggaaaatggcgccattggggttgctggctgggataagtgcgcattgagggtttctatcgtttgaccaggattcggtcgatcggagaacgaaactgctctgttcctgatgtcagcaccttcaattgaacatacacgccccgaaagtacatactgcatgccatcgccaggtgttccagttggtgtttttgtgccggcttgtgatccaaacttttcgaacttgctgacttttggtgtagcgggggaggtgaattcggccttgcgcttcgctgatccaaatccattcccagttcgagcattcgagccagttggtgtcaattgatcgaacatcccaaacatatcgccaccagctgcagccgcgccccgcggagttgctgtgtttgcagttcgtttttctgtgtgccggccggccttgtcacgactttcgcgttccaaagcttcttgaacatcttgcttgaagcctcgcactgtttgcatagtcaaggttaccccttcgcccatctttatgctgtatgattcccatttgtagaacagctcctccgcggtgatcgaatgcacccgcagtatggagaagagctcggcaaggatgtcttttgggattccatcggggaatgagcccacaaaaaactcattgagctctccctcggcatccattatggcgaggtgtgtatcgtggaagggcaatggacattgaaagtgcagacacgcgcaagacgcgtgagaccgtgtcgctgacctaagcggcccaaagcagtaatattattcgagtttgatcggagtggacctgtcgatcgcgagaattgtgattagcttgcccctaaatttattattcattctctagattcccacgtgtcattgtaaattctatatatttagatccatcaagatcatgtcgaactccgaacaaggcgctactgtgcacccgcccaccaatggcgatactgtgtccgataccaacatgcaggcatcggccgaatcagcccccgtgaacgcccaggacgagtctacttcaacctcgcagccaattgacctcgagctaccgacatccgctgccgacggtctcattcagaagcctttcggcaagccgctggacacagccaagccagtcgcacctgcgccgcttaccccggaacaacaagccaagtacgacactctgttgaagctcgtttcatcatggaccacagtcgcagacaaggccgagaagaatgccccgacatctcctataaccgaggatgagcagatgttcttgacccgcgaatgtctcctgcgctacctacgcgcgaccaagtggaacgtgtccgaggctgagacacgacttcagagcactctcacctggcgccgcgagtataacctgaagaaattgacgcctgattatatttcaatcgagaatgaaacaggcaagcaggtcattttgggctatgatatcaatggacggccatgtctgtatctcttgccctccaaccagaacacggagaagagtgaccgccagctcgagcatcttgtcttcatgctagagcgggccattgatctcatgggacctggtcaggaaactcttgctctgattgtcaacttcaaagagacgaagtctggccagaacgcaagcatcagccaggccaagcagacggtcggcttcttgcagaaccactaccctgagagacttggtcgggctctggtgatcaatggttagtgatgtcatatcccagtcaatcttatgacaagtgactaacctcctatattagtgccctttgtcatctggggattcttcaaattgatcacacccttgattgacccgaatactcgacaaaagctcaagttcaacgaggacctgcgtcaacacgtcccgcctagccaacttatgaagtccgtgggtggtgatgtcgaattccgctacgaccatgcatcctactggcctactttgaacaagctggctgaacagcgccgtgaggcgtaccgtgaacgctgggttcagggtggcaagcaggtcggcgagtttgagaactacctgaagggcgaggacgttcccaacctgtcccagaccaaacttgaggccaaggccagcgaacaagcttgatgggaagagcatattattttgcgcctattttggtgcatttgcatttttggtcaccgtttatttcatcttttctattggtcaatagccggcatttggtcacagcgttggattgattactgttggattgttttacatataccgctctgtttcgacacgcctgttcatagacatgtcaatctttgtcaataattaagcgataactagagtacccaaattatagatacctaatttcttcagtttcctgtttcctatcatacatacacatcaataaaagaagacaaaacgatagatattgatacttgattatatataggccggagttagtttggatgcaaaagtcaatcttgttgtagcacaacgatcacagtaagcaagaatagctggatgcagtcgctattatttctctagatttagatagcttctaatcttaacaccgtcttcattaaatcataagcctcatgtgcgtatcatagccgctctcttctatcagatactatactctagattaacaaagcttctccaacggattggcgctattatcattacagcatgactggccgaagaagaaatgttgcctgtagactgttgtccaacgcctttctcgggggtcattggttgaaaatggtactgttgggattacatcgtccttggtagatacttattctagcccgacgatatgtcggataggttaacccgatggtgacgtaaatgagcacataaacttctgcttgacctcttgggcaaaagcatcctcggctgctttctttttattgcgtaaaacccatgggacaaatgtaaagtggagctacaggtgagcccatgggcccacctgtgttctggatatcgcctactgtaagcaaaccatcctcaaccaatgaacatcctttggccttcgggccccagtctgattctcttccgaacaccacgcgaggatatccatgaacagtaaaaagtctaaatgtatctaatcaatcagataaaaattcaaattcctccgatgatcgagtttccatccttccatggaaagtttggtggcgctaattgttgaattaccagaataaagatatcagcagggtgcttcgggcgaagtatggcattttctcgctggagaccttgtagaccgttccgttttaatgcctactctctgtcgctttttgctcactgagtaaaacctagcatgcccttgaataccacgtgactttacagtcagcagctcagctcaatgtaaaatgcaccacgctagccccatccaatgaagtctttgaccaacacacaagcttttgtgatagggcgatgtagtcccagagataaatagagtctcgggacaaaattcttggtacaatctttgcagcgcaacatttaacaacatcgcgcatcatcgcatcataatgggggatcaagcaaacaagcgtatcatggatcaaatcccagacacaatcctcaaactcctccaagaagttgatccaagaccagttcgaatactgggtggcacccccaacagcttactcgaccctggagattatttgggatttaatacgtccatttgtgtcaaaggctcagtgttctattcacaagtgtcgtccagaagtccagactcgttttctcgctgtgaacgtataccctggaaaccctacctgatttgactttctaattataatcaggaatggaagctgcaatgctgggggcggctcagcccaagtatacaaccttaaagacgaccatgagcgagcaagaactaatatctaccaaactatagccaattccttaaagtgacacaggatcttaacgacatacccagggttcatattccttacacttttagatacagtgctgtatcaggacttcgtaattaacagtgggagcccatgacctacaataagcggtatggagtaatggaggcgatatggcaagccacagaataaatggccatagtcagaatacacgtgactaactagagcatgctcagtctgagcccgtgctgacatctacttgctgatcctgagcctgagcgccctcataaacggcggcagcctagatgggaaaggcctcaccgggcagacattatcctgtctatacgacgtatagctacatataaactggtggctaacgtcggtaagactaaagagttcggaataaaatagtctgatgcttgcatattccttatacaaagtgtcggattttacattactccgtactccgtagaggttccaacgttgacaaagtttttcactttccgaatcggttgagcgggtacactatgtcctctgtacagccaccgtattatgataagattgctatcaatcagttggatactcggtcagaattctccgggtattccccgtttccccgtagccctgtaggcccatgctttggacccctcattaatgtaattatcccgactaggttgctcaagtgagaattccggttttcggagcgcgtttagcgagacttatctgcttctaagccttgcattagaggaattatcccgactacctgagcccatgggttgaatgaatttaggaccgggcagtgcttagttaggtggggaagtacgggctacgtccacgagataccaagacctcgggagaccctgcatgaaagcttagcgccacttggtaaaattactagttcacatgtcaaaatcgatttccaatctacaaagtacaaaatgaaaccttgggagctcgcttcctcggcccaatgatcctgctctcgcccagtggaccactcgccgtaagaccccatccgatattcgaaccgcccgatctctctcgattgattaaatctgaagagccaagacaccagtgcctgcacgcttctccgaagcgggacctcttgtctcaacgggtgctaccggatcttcatagggacggcgcagaatgaaggctctcgtcttggccttggcccttgcgacgctgttcatagccgggtcaatgatcgggatagctccacgcttctcacggtagaacatcagcgcatagccaatcatgacacagatccagtataagttgtaggagatcacggagccgtaatcggccgaattggtccaaccaagaagcgcgttgaagataccccaaccgccgccacctcccagctctgggttacaacagttcacgtgccagacactctgtcggatgtcgtaggatccggcaccagagccagtctccgacgcgtcgcctccgatgatgttgttccaggcgttgttctccaagtaccacacaccacgcgagaaaagaccggcggcaacgaggtagaggaagcaagtggaaatgatcaagaagatctgcatcgaagtctgccgtccacctctatcggtatgttagcgctgtatatttatcaaagacgatcgaatcgacataccggtagataacaaatcccaccgcgataccagccaaaaggccgcaaaagacggccaaggggaaggaggtggcagggagccctaatccaacaccaccaacatagacaacggcttcgagaccctcacggagaaccgtgataaatggcaggatgaacatgacgtatttctccaaccatctcttgacgcgacccttctttgtctcgttaggatcgtgctcgtgttggagggccttggcgagcttgacacgccatttgtcttgaagtttagacacgcgcagaagggcagcgcccatcacagtgatgatgatcgatgcgatgattcccagaacaccctcccaaatatcctcggtgctggagaatgtgtccgttccgaggccgtaaaaagcaccaatcatacctgctccgactgcgagacaaataaatagacctaaggcgcatcccagccagacctatttgttttagcagatgaaattgcataggagtgtaagagccggtcgcttacttgtttcactagtcttttatacgtcgggcgatcactctcgtagagcgattgtttcaagaatgccagtagaactgacacgaccaccgtcgtctcgagacattctcggaagcagataaaaaacactgattgaatatttagtaagtagttgtgtattccaaaaagcagatgaactataccggtgacagcgaagaccttgttattgcccatgatgcttgatatgactttgccagttccccaaagttcaagggagaagagactcaaataatataaagccaccggaaagcaaagcacccgataaggtctcttgtagccgtctgaaaaatatatatcgaaattcaaaattcaaaattacgcgggagacaacaagcgtttcgatgtctaacgacccacctgtattgatccgattgagcttagcattcttggagggttccccgtatcagaagcttttttgggcatctggcattatgattcgtggcagtggatatgtcttgaacacgaacgctcacctggccagggtccagccaccttagttgagttgaatcggaaaaataaccggcctgaagggatagaggtcatgccatattccttaatttggcaggtgagcagaagttcataaaaatgtgattcgttcaccattgaatattaagcgaacaccttgccttatggctgtgtccaccgttggtatacctggaaccaaaccaataagaagggggaaacctcccatggatttatatctgattaggatcagaaggatcggaaaggattgagtttccccttatcaatcttgtattgcgctcggactattccaaacttccgttcccaagcgttcccaggctttcctaagctcatagtccttctattcctctcttcacccggaaactggaaattcttttcctgcttcttccccggcgaagtattcaagcatgactgtatatacaatgctgttccgccttgcggcagtactacttcttgtacagtactgtcaagcgaagacagtgaatctggatttcaatgtcacctgggtcaatgcaaaccctgacggtctctatgagcgcaaggtggtgggcattaatggccagtggccgctacctgtgattgaagtggacaagggagatcgcctgattgtcaatatgtacaacgggcttgaggacaaggagacttccatccattggcacggcatgttccaaaatgacaccaataatatggatggtccagcgatggttacccaatgcccagttgctcctggcgcctcgattacctacgacttcaccatcaaccaaaatggcacttactggtatcattgtcataccgatgcttgctacccggacggctatcgacaggctttgatcgtgcacgatgatgaggcatatttcaacgatatgtatgatcatgaggttaccgttacgatgagtgattggtaccacgagcttgttgaggacattccgttcattcgtgtccaaaacccgacgggagctgagcctgttccggatgccttcctcttcaacgacactttgaacaccaacattcccgtcgaggctggaaagacctatttgatgcgattgatcaatattggtgcctttgtggcgcagtacttctacatcgaagatcacactttccgcattgttgagattgatggagtatacgttgatgcgcaagaggccgatactctttacatcgctgttgcgcaacgttattctatcttggttactatgaaaaattccacggacaaaaactatccgatcgtgacagttgccgactcaattctgctggatacaatctcgccttctcttcagctcaatcaaaccaattggctcgagtacaatagcaatgcagcgcatccgcaagctgtaatgaaggtggatattgcctccgaccttgtcccatacgatgacgtgaagcttgttcctcacgaccggatggagctcctcccagaacccgatatgattattgaggttgccgtcattatggataatctgaataacggtgcgggctatgcgttcttcaacaatatctcctacacgaggcctaaggttccaacattatactcggtcctcacatctggagattacgccacgaacccgcaggtttatggagaattcacacatccgttcattctcccccacaatgcggtcatcgaggtggtcctcaataaccaggacggcggttcgcatcccttccacttgcacgggcacaacttccagctcgtcagtcgcactccctcatatggcccttctttcaatgactacgccgacggtgacccacttccttacaatgcaaccgataccccctctagcaccttccccaaataccctgctcgccgagataccttcgtcgcaccaccccagggcaattttgtcatccgtttcgtcgctgataaccctggtgtttggttgttccactgccacatcgactggcatatgtcgcagggcttggcgatgtcattcatcgaagccccgaagcagattcaagagcgaatgtcgctgacagagagcgaaattaacctctgcaaggctgccaacctctcctacgagggcaatgctgccgctaacacggaagatctgctcgacctgaccggtcaaaacaagcagcttccgtggctgcctgctggatttacggcgaggggaattgtcgcaatggttttctcctgtgtgtccgctttcctgggcatggcgttcatttccttctacggtatctcaggcattcaaaaggagactgctgtggttaccgaacatgaggaatcgtgaggtattttattggatttctgctgtactttaatatatatatttgtctttcttaagtggataaaaattttcattcaccttgaattgttcggttatcaaatattccttgcatgtggaatatagcaatacacgtctgaatggtactttccaagtgaaatttaaaggacaacttgggcttccccgcaatatcaaccctcggtcatcggctttactttccattcctgggaagcgacgctgagaagtacggcatcgcattctcaggtatgttgacatttggcagaaatgacaaaagcctatgtaattgggcttcagcagtgaaaccttaacagtataccgatgcccaagtcccttcccagttttgggctggtaatatgcctcctcgtgatcttaccctcagtggtgatcacactagcatactgcccccgctgcggagcatcagtaaggcctatgcgcctgtgtatccattttggtatgaaatcaatgaacgatagtggaccgacaaattaggttctcctagcgatgtcgctgtcgtcatccacgctggtatctgcaccatttctgatccatctgaatatgaaaatgatggttactgcgggtttggaattatcgaggctcgcgagattgatgcgatcaatatgctcgatactactggttagctcaatgtggtgattatgtgctctccaactcatccgcttcgaccaggaacggatggcatcaccaaagacatccgtgatcgcgtcggaactgacaatctgatctgtctttcgattgacatcgacacccgaatctgcttgtaagtgtcttttctggagaaggcaccattatttattgaggagttccatgaacttcaacggggcggaggtaaggcaaatttgctcgtatttacgcccatagccgtgtcaaagaattgaagaatggaggagggtttgaaacccccatgtcaggttgtaaacaatgatattcggtgcttatggacaggcgttagggttcgggttcgggttctagcatatgcagcgcaaggattttatttagcctagaaatcgaaaaaaagctagttatcgcggatccttcaacggtttgatgatagtggaccttttttccaagccaatccaggaacgaaagtcaaaaaagacacatgtttcagcgcagtttccacgctaatgggtataagaggaagactagatatcttgggctcgagatggatagccaattacagtactccagctggaaagttcaagcctttagacataccacggagtactctccaggagtactaattatgttgtaaagaccgtttgacatagcagtggacatcaagcgattccccaactctgagcctggctccgcatcgcggtgaattagggtggaccccgggtctaagagaactaccggattggtttggctggcccgtcttggacaccattgggctccatctggaagtgaacacgcagcgatcggcatccagaagggccattgggtgagtgggagggtcgaaaggaaaaatgagctcggatagttcctttcagcccctcaagtgcaccctgatagagctaaaaagcaaacctgaaacgaacaggcacaacgtggagacttgaaacatccggcagttttaatttatggagataagcgtcggccataatagttcacattggaagatatgtcaggcaaggcgtgacatgacactattgaaccatgtgctcggagtattactcaatgggacattgctacatagttatttagatagtagttaggaccccctacttagtagaagatactaattaatacaaagaaaagactccgaaccttcgtagagagtacatggagttccaacgatccagacctcgggaggttgattgcccctgaatccccaaaaataaaactaaaaagagctttagagcataaaatcacccttcatcttaattaaacgctagactgttcccagcagtgcacggtgtccaatttctccagcatctctctggacctttcatatttccgcctccctactttctgcagaactcacagaggggactgacaggtacgcgtctggttgttgatgtgttcttatcgatacggaaaaaaagatacttagggggggctaacacttgacttttctccacattctagtcatctcctattttacgcttcatgactccacgcgctatcgattagcacttcgaatacattctattttcgtttcacctggtgcggttctcttggggagagagagatggccgtctcaccgccagcatcacccactgcacccccgcgccctatcagcgctgtcatgcgcactccgcgtagtaccagtcgtttaagtatgagcagcaggcaaggtggaagtcgtgcatcggatgaggatggcaagactgcagtcaaagtcggtatgtgcattcttccccctgatcggcccattccatgcaatcaaggatacacaacatcggctggcaaccaaattcaggactgaccttgcgcagctgtccgtgtacgaccaccactgaaaaacaccgatcctggttatgaattgattccccagagattccagaaacccatagtccatgtcaccgcgcccactagtctggccgtcgatgtgggcgctgcgcgcaaactatttgtgtttgatcgcgtgttccctgaaaccacggaacaggaggggatctgggaatatgttagtgatagtgtcgactcctttgttctgggttacaatgtctccattatggcgtatggccagtccggcgcgggaaagtccttcacaatgggtacctccggtcccacggagcagaataacatgcagaatatgggtgagtttgaaatgcgttggtttcccaatcaactcagggactgatcgtgtgtgtgcattgtgatttaggtatcatcccccgtgctgcacaggtcttgttcgataaactagaagggccctcgaaacataaccggaatagctcgcatccgactactggcctccgaacacctcaacgatattcaatgacttctgccgggagctacgggaagttgaatcacgagaaagaaaagagttggcagctgaaggccacatatgtagaggtgcgcgtttattttagggcttgtttgctggcagcgcattgttctgaccattgtcctacagatctataacgagcacctgagagatctactccttcctgaaacgacaaccacaaccgatcgcagcaacgtaacgattcgtgaagatacgaagggccgtattattctgactgggctgcaccaagtcaatattaactcattcgacgatctgatcggtgccctgaactttggctcggcgatccgtcaaacagattctacagcaatcaacgccaaatcgtctcggtcacatgccgttttcagcttgaaccttgtgcagcgcaagtcctcaccaacccatgcgacgccgagtcccataaaggagaagcgtatgtcgatgccggtcgacacgttcaacgccggagaaacagtcactgttgatagcaaactgcactttgtggatttggcaggtagcgagcgactgaaaaataccggcgcctccggagaacgcgctaaggagggtatctcaattaacgctggtttggctgcgctcggcaaggtcatctcgcagctctcctcacgccaacagggctctcacgtctcgtatcgcgactcgaagcttacccgactgctccaagattcgctcggtgggaacgccttcacgtatatgattgcttgcgtgactcccgccgagttccacctaagcgagaccttgaacacaatctcatatgctcagcgggctagagccattcaaagcaaaccccacattcagcagattgcagacgagggcgacaagcaggctttgattgaacgactcaagtccgagatatctttcttgcgcctacagatccgcaactctgaaggatccgagcgccgtgaaggaggacccactgaacgaagtgaacgtaagaacgaacgtgaaaagcacttgcagaatcagttgttagacgtccaagaaagctacaattccctcagccagcgccacgccaagttgatttcgaatatggccaacgattcgcactcgcctgctgcccacggcgaaatggacgacgctacctccgaaattgggaagaactcggttgagagaatgcagcgatcaaggtcctttgccgagtctgtggagcagatggttctagagtacgaaaagaccattcaaagcttagaatcttcactctctgaaacacgcgcctccctctctatcacggagagtgatttgctcgaacgcgagaccaagtgcgcctatatcgagacggtaaaagaacagctccagacccgggtccagaagttgacggaccgagaactcaacactgagaactacctccacgaattggagtccaagcttgatggccactctacaggcgaggagaaacacgctgccattgttgcggaattgcgcaaggagttaagccgggcccgcgataacgaggccagctgcgaggaatacatctcgacacttgaagagcgacttgcggagggtgatcaggacatggaacttatgcaacgcgaggtgatgcgcttggaacatgtcattgagcgccagcgaggcctcgggcagctagaccgcctactcggcgagctggacccagaaaatggtggggatagatacgacgttgccaatggcactgactaccaacactatcaccagccaagccgtttgcaggcctctcataggcacacgccctctctggacgttctcagcgaagcagcggagacagccatcccggagtcagacgaggatcttgtcgagccgaccatagaggccgagctcgaatctatcggagaatccgagcaggggacgggtgaggacttgaaggttctggaaactgcgactagcaagctggaggcacgtcgcacggaggctcttcgtgaagacccgatcgcaagtcccgctcagtccaaattcgttgccgacaagcttgagactgtcacccaggagctgctcgacctgcgtctgcagcatgagaacaccgttggtgacttcgagaacctagaacacaaataccagcaggctctcaaggcccttgaagagcttcgccaagacaaaattgacgaagcctgccacccggcacctagtgttcaaaaccaactttcaccgcgcccggtgacttttttagagaatggaggcactccgacctcgaagcctggagaaccacactcattctcgcaatcactctcatcggaattatcctcggtcggggagcaatccactttgcgcgcattctctgaggacgaatcgaaggcaattccatccatgccctcaacccctcaagtgcaggtggactccgaagagtccgagagcatgcgtaatatgcttgctgagcatcaggagagtgctgagctcatgacccagaaatatatggagttgcaaaacgagcatgagcagattctcggactggtcgaaaagctgaaggccgaggctcgcgccaagtcaaactcaccccctacaacccctggcatcaaagtgatccgccgcatgactagccagaacattctgtcaggagttgaccgtgcaaccagagccattactgggcttcggctccttgcgtccgaggagtttgctgacaagccggacgctatgctcaacttcgactaccatctggatcaaaccatgcacgaattgcaaagccgcatggagcgcctccaatctctagaagccgagaaccagggcgttaaaaaagaaatggaaatgaaagcaactattatctctggcctgaccagagaacgctcgagtctgcagggtgcttcgcctgtggacatggctttagtgtcgcaactgcgcgatcaagtcgtctcccaggaaaggcagatcaaccaccttcgagacgctcatgaagcccgccaaaaggagctgttgactgagattgatactttgaagggacttttgaagtctcaagagaacgctagccgggcactcgacgccggtgccgaggagcaggaccggaagatcggtgctctgcagggagagctcacggagtggcaaggcaagcacaagagtgctctagagtccctgcagtcctcggagtcgcagctcactactactcttgctgagctggagggtgctttggcttcggtcgctgctatgcgctctgagcgtgctgttaccgattccgactctaccgagaaagaagtcactgcgcaagagcttgagggtggccgcgccgaacagcaggagcttgtggatagcctgatgaacaacatcgaggatcacaagtctactattgctacccagcttgctacgattgccgggctggaagaatccctctccggtgcccgggaaaaactggcttcacagaccactatcgaggaagagaccaataccggtgctgttgacctgggtctttcttctcggatggccgagcttgagcagcaaatttccgcccacaaatcgtttgtcgattctcacaataatgagctagctacactccaggagtctcacaagcatgaactggccgagttggaggagcggactaaggccgctgcccaggccgagtacgatgctcgtctggctgagaaggatgctgagcatgagcaatccatggcgactttgcagaatgatattgcagagtctcgtaatgagttagtcaatctgcttaaggctgtgtcgactcttctcaactctgaagtctccgccgagaacttgacggatcagatccatgatgttttggtccagaagcagcacttctcagacaagtatgccgagcttatggacaccaatgaacaccttcgcaagcagcttgaggctaacgccgatgctgagagtcgtctggacgaaataaccaagaagaacaacgtccaggacgccaaggtcaatgagctggctctcttggtagctactttagaggatactcttcgccagaaggacgaacaggtcaagaagaaggaagccctggtcgaggagatcacaatcgagaagcagaagagtgtgcgtctcgtggaggagctggaggaacaaattacaaacagcttcgatcagcaccacaaccgtctgtccgtcattcagcaggagcgtgatcaggccctggaagatgccaaagccaagattgtgatctacgaaggcgacatcgagacgtaccaagtgcggatcgagcaacttgagcttcaaatcaagaacaccgaaggctcccatgaccgcagcagctccctcacctccaaccttcgcaagagctcttccgccgcctctcttccctcgcctccaccggcgatccctctccctcccctccccactatcgcctcgcatcccaacggcgcttcgagcgtgtcgccgcccagctctcgacacgccagcaaagagctgtcccatgtccaaatggtcgaggagcaggaggctcgaatccgaacaattgagaagcacttgtacgccgagaagcagctgaccgccaccttggaagaggccctcggcgaccttgaactccagagtaccaaggtcaagaccgactgcgaggcctggaagaagaaggcctgggaattcgaggatgaactctccaacctccgcaaggaacgcagctctgcccgtctgtccctccaggccgtcgaagaggagcgcactgcccgtcgtgaggccgaggctgcgcgcgctcaactcgaagcgcgcatgatcgccctcaacaagaaaaagaagaagagcaccctcaactgcttctaggcgtttttgactctgaccttgctcgcgtttgagctgttccagcgtcaaaagcaatcgcattctcattcgtcttaatcgttctgtctggttgtacactttttaccttctctgttactcttgtcttctttttattttttatttttcttattcgtcccttgtttcataccccttttttatttgattccaagcagttagtcaccgatttccgtattatgagctttcacgtttttgtcactttcccctgtcgattccgtcaataccttgtcctccttttctcactccattcttcacatatcttttctttttctacttgcactcatgaacctatcatgacttgtagatctttttatcgcccttctatcatccctacgctgaataacctcgatgttgtacattccgtcggctgtttctagattccgttgaatcttcatgtcgcaatcggggggaatcttgtcagctctcagttgcttttctgcacttgaatttcatatgaatgttccctcgttcatcttgaaattcttgattcgtccattcttatcaatgaagttaccaatgccagcctacttattctttctcgctgagcctgtagagtacaaatctgataggtttcgaaattcactccgtgaatctgactgagtaaagagcaagtagataattcgagcttcatactgcttcgttgaaccatttagtaagatatcactctacgttgtcttcaactgctttgcaccgatgactatattggatactcggcatgatagtacgactaacactaagcccaccacggccttaagagcaccgcaatccaagggtctatatcctaggtattggacgttacaatgagctaaaacatcatcgagactaaatatcagacaaatggatcaattgaatttgtgtaataacactctggcatattcgcatcacatgacgcgtataccccacgtgtctttaagctggttgcaacggcagctccaatctccaagctccaaaaacaactcaccatgggcctccaacggtccgatgtgacaataatccacccagatctgggtatcggaggtgccgagcggctaataatcgacgtcgccctagcccttcagagccgaggccaccgcgtaactatctacacctcccaccgcgataaggcgcactgcttcgacgaggcgcgcgatggcacgttggacgtccgcgtgcgcggaaacaccatattccccgcccatatctgcggccgactccacatcctcatggctgctctgcgccagctacatcttaccgtgtcactactaggtgagcttgggacaagggagaccccggaggcagctactacaaccaccgatgacgaggatgaccgcgacgatatcttcattgtggaccagttgccggcctgtgtgccgtttttgaaatcgttcggccgcccgcgcccgtcccgacgccagcgcatcctcttctattgtcacttcccggatcaattgctcgcgcgccgagatgagggcggctcgcttcttcgcttggcgaaggtactgtaccggtttccctttgattggtttgaaggctgggcgatgagcgcgtcggatcgggttgtcgcgaactctagattctcccgcggggtcgtgcgtgacgtctttggctcggaccggttgggtgatgtggaggtggtctatccatgtgtcgacatggatcccggggtaccggtacctgagaaagcggaggaagaccctctctggggtgggaagaagatcctgctcagcatcaatcgcttcgagcgtaagaaggatatgggtttggcgattcgcgcttataatggactgggagcggagaagagggaaggaacgcgattggtgattgcgggtaagaaactgtgcacagatttgcgatttgtatgaattctaacatcgtaatttttaggcggttacgacaatcgtgtccacgagaatgttcactaccaccaagagctgaatgagctcgcgaccagtctcgggttgaagaccgcaacctccaggacagtgctatctgcactttcaatcccggagaacattgatgtcctcttccttctttctgttccgactgcatttaaagatacgctgttggcacaagcaaagctccttctctacacccccatcaatgaacactttggcatcgtacctgtcgaagcaatgcgcgttggtcttccagtgctagcatctaatactggcggcccactggagacaattgtcgagggtgaaacgggctggctccgggatgcccacgcagatgaagaatggactgctgtgatggacaaggcactttacggactgagccaggaggatcttcagcgcatggctcttgctggcaagaacagggcgcaacaagaattctcactcactgctatgggcgataggctagaagaagaaatttccaccatgctgaaagctgaaagaaggccatttaatgggtggcagcaggtctttgtcattcttgcactggttggggctcttcttgcggtgatggctgcagttttacttcgagtgctataatgcatagtttgcgtcacgcattaaaattttgtactttatattagtctatagattaatctttctcgagttgcaccagtttcccatctcctgtactaaataaatgttttgtccacccaactttaccaaaacactctcacatccaagtcacatgacctcgtgtgttttgctcgcggtgacgtcgcgtccccctctatctttatccttaatcggccgccctagtggcattgggatttctcaacatgcccgaagtaatagaccttctatcctccgatcctcctatcccgccaaaaccccaaccgcaacagcaagccgaactcccgtcgcgacttgcatcccaccagctcaatccgatttcgtcagacccgttcgatacatccctgttcgactatgaagacatcttcgacaagccggccaagaaacggcgagtgagcgatcaagacacttcttcagtgcgaaaaagcaccacgccaaacgagcctcgaggtccggcttctacggcagagccatggttctcgatctccgatgatgattttgacctgccgccagtaaacaacgcggcgaaaaaaaccaattcccagtcgcgtgttgaagagtcggatccaattgtttttacctcttcggccccagctcccttgaagcctttgtcgcggaaatcgaatctttcaacccgggatattgttgcgcttgatgacgatgacttactgacggatcccatgaaacctccgccctcgagttaccgaggacgtagcgatattgatgaattcagtgatccgttttctctgccggagttttctgacctactgaagaaacctactgtctcgaataccatcttctccgagtcgactgctcgcctattatctcgccttggcgaagatacttcaggccctaaaacaaagtccggtactcgaaaacagaaaggcaccagcttggaatctaaggctgcagaggtcctctccgatgatgagattcatgaaccagtagtacccaaggcagcgaagaagacaagcaagattacttccgctgaaaaggaagcaaaggccaaagcacgcgaagaggcaaagctgcagcgacaacgagaacgcgagctggagaaagagcgcaagctcaagctcaaagaggaaaaagcgaaagagaaacaacgggctgccgatatcgcgagcgtcaacaagctgaaagtaaacaaaaaggattctacaccagagatgatcgtcgacatggctacatctttcgaggacagcagcgtcggcactcaaaccgtcgagttcatgaaacgactcggcgtccaacacacattcttcacaagcgcaattccccacgtagtaaaatggcgtcgcaaaatgaacgccacatacaacagaaccctacgccactgggagccctgtccattctttattcaaaaggaagaccacgtgctgtgtctattatccgcgcaagagttcatcaaaatgataacccccccaccagacgacgaagaaagagaaaccctagaaatccacgtcctccgaattaaaagcgcctacccagagtgcaaacccatctacctaatcgaaggcctgaccgctctgatgcgcaaaaacacaaacgcacgcaacagagccttccaagccgaagtcctgcgccaactcgctgaaacaacggtaccagaggaacagaccacatccaacagagcccgaaaaccaaagaaaaagccggatgcgacgcccctcgtcgacgatgagactgtcgaagatgctctgctcgaactacaagtcacgcactcctgtctcatccatcacacgaccgcgccagccgactccgcggagtggattaagaatttcaccgagcacatctcgacagtcccgtaccgtcgtgaacgacaggaagcacacaatgctgctttctgtatggacaccgggcaggtgaagaccggcgccgataagaaagatactttcatcaagatgatccaagaggttagccgcgtgacggctcctatggcttatgggattgtgggccagtatccctgtgttgcggatttgactcgcgcaatgcggatgcatggccctctgatgctggaggatattaaggtaggtttctttttctttcaatcgctatactggtttttttctagatctatactggctttgctcttttttttccgccggattctctactgactgctgtagaaatccgcgaataagaacggctccctgacgaatgcgcgcattggacccgctgccagtaagcggctgtacaaagtgttcactggactcgatccgagttcaacggacatttaggtttgtttttggcctcatttggttttttggttatcatttccatttttggcttgaactactgcagagcgtagctttgcattctggacgcatccaattggggtggcggattttcttttggttaatcactccagcacggagtagttggacttctaatactctgcctcgcctcgcctctcttttggatgggaaattggatattcccctgcaaatgagatagaattccttggctatgaggctgcggatgccagttggtgcaggatgcagtgatcacttttttcttcttgatggaaatgttgtatttggacatcctcgtaatatgatagaaagtatcgaaacaataaagactgcctagctatatgcaaatgccaaacccacatctatgcatagaacccattatcaacgccaatataaacgcatatgtcaaaacatcaaggacatacacaagatcaaatcaaatgcttccatactaaacactaaacaacaacccccctcctcttccaccccctccaagcagccacccaagccagaacagcaacccacacactaaccgtgcagccagcagcccagaacccatagcatcgccatccatggcactgaccatcagcaccatcaccgtcgccgcgatccatggcattttgatatgccgcggagtagataatgccccagagcgcggcaccagccgcaggcatcatggcaacgataccccaatttgtggcgaagttctcgacgccccagacgacagagatgatgataggcgcgagggaaaaggcgctgccgtatccgaagccgatcagcgcggttgtcaggttgaagatgcctgggtgcgctaatgggagaggggaggcgaggaggaggtagcctagggagaggaggaaggctgaggggacgaggaaggtcatgcgggatagagtgaggcgcgaggatgcaggggatgtgaggggcgcgtatcgggctccttcggaaatcgaaggaaagaggtgtgttgccgggggtgcgaagaagtcggaaagtgagcctgttagaaggcgcgcgatggtcgaggttagggctatggttgtgacgtgggttgagggggatccggctgggggtgatgcgcctgtgggataggattgaggtgtgagggttgggatgattgtgcccagctattttggtcaataggttagttatgggttggagtgagattggagacgaactcacgttgttaatgtacgattcgccggggccggtgaccaagaaaaagcctgcggccagccaccacatggtcttgtcttgtaggaatacacgggtttcatagttgagcagccagttcctcttccggcgctcctcttcctcgcgctccttctctagcctttgctgctcacgttcttcatcggagaggattgattgctcctcatcagatgaatcagagaacgtgccgtactcaatcgcttgtggtcggaagaaatcactctcctctaacagtccactgcgctctagttcttcaaccgtctcatcaatatacttatcatcatcatccacgatgcgcaaggcaaaggtaccgatgatcccaatcaccagcaaaagcaccgccagaaagacaaagtatttataaacgtcgagatcgccgtgactcccatcctcgaggggttcataaaacaggtacgtcccgagctggctctgccacataccactgagaccgaacgcggcaatcggaacagcaagcataatccccttgtgctttcccctgccaaagttcttggcgcacgtcgcaatagctgctaggtacatgcagctagtccccataccaatggcgataaacgccacgatcatcacccagaatggctgaccggaaccacccgcatcagcaggtgggccacttttatatgtgaatgcagcgaggagatacccgacgccaaacaccagtcccgagaacatggccagtggcgatgggctgtagcggtcacacaagtagccgaacaaggggacgggaaggtacattgcgatctcggcagcgatggaaacggcattgacctggagctgcgagtaatggagtcgagtaaggagaagatggccatacagagagaaagcagtgatgctgccggctcccaagctgcaaaacacgaatataagagtcagcttccaggatcccaatggagatagatcgtctcgtaagcatggctgcaaggaagaagagtttcccataccaagtaacaacaccccagccaaagctgagcactcggataacctccttctgcatcctccgtctgtcccgctcgacaatctcttcgacgacatcgctcaacagcccgtcatcactcagtccgtcattaccggagctccgtgaacctcgccgtgaatatcgccatgacggctctgcgtttcggtctgttgtatcttgttctgcatcaatattttggaggagtgggcgattcgcgtcgaaatcgcgcttatcgatcgtcatagtgccttctccgcaccggttacgctaggctgtgcaaccgactctttgtctgaggggaagtgtaagatgggtggtatagataggtatggaaggcgggaggcgtttgagatagaactatatggtgttcacgatttggcctgatatgtacgctgagtacgattgtccgtgtgatagagcttcaagggtggagcggtgtctgctgggtggatcctgaggttgcgttgttcaatgctacgtcattggagttcagctttcgatcccggggagttatgttcaatgtagaattgtaggtaggtaatatatgtgatgctcaaaaggcgtagtcgtcaaggcaagctgaggaggacttcagcggagagagcggagagagttggagtcattacacgtgactcattctacaatacccgatcacgtcattgtacggagtaaaggaatacctatactgtgatatagtggaaacgaagggaaatacaccatctagagataaaaaggatattcatgtacaagtaataccataggataacaacaggcagaccgaaaaaaaggatttgaagacattggggggtattatcaatatcaataaaacagaaagaaaagaaactgatacacgcccgagaaaaaaacaagacaaaagggcttccgagaaacaaaaagaagagaagaaaaacaaggccaaagacaaaataaaaacctcaaacgactctaaatgcatccaagcgttgacggggatcatagaaacacccattgaagggccgggtcgttatttcgtagtgccgacgatcaggcgggatcaggcactggtgcatatgaatgctggcgttccgatgtggaaggatctaccctccgaacgccacgtatcggcagtgggccgagagatgataaaaacaaaagaaagcaaaaggcgaaaaaggaaaaggaaaaggagctagaaactgacttcgcccgcgtcggtttctatcatggtctcatcccaatattgagaagagggtcgctcacgagcctcgggttgagagcccagcgcgatggcttcaccttcacctcgttccacgaattcgtccagactgacctccttcataattcgctggaaatacattcggagtgtgcggaggccacgcagatatccacgatcaatgtcgtgcgggctgtgaggtgggcatggcgtatccggaggaagcttgtcctcgccagtgatgcaattagcgaaatcgacaatcttcagttgaacgttcagtttgctctggccgtctgcatggtttccattattagaacgcggcggttcttgctgaggtggagattgtggttctccgtcataaagaatcaacagactgctagcatagagccggtagctactcaactgtcgaatcatgtgctctaacaaagctaatttctccagaatgacagggatctttttggcaacactggcatagctgacaccatcgtataggaatcgagtcagcgcatcctgaaattcacgaccagacttcaaatctcgcccgaaatacttgtcttcaaacatgtactcctgcttcttgacgttccaggactgcatgccacagagccgcacacccagctgctgcgaagtagtggactgacatttccgtcgctgagacttcttcttcttctcattcgcctcgataccatattgacgggtgcccatcttcaaatccagcacgcatggtttattcataccagctgtcagatcctcaaggaggaggaagaactgcactctttcgtcctttctcagctgcgcctctttggggttgctgggcaagatcgtgttgataggctcctgtggtttgaagcgcgttggatcagaagttctaccgaaagcagcttcggttgcgtggccaccattggtcgagttattttccgacactgggaccgtggaggaaccattcgacattgaggcatcggcttccatggagaaaatcccatcctccttgtcaccgccataatcatcgtcatcgaagaacatgagttccccattgttgttagagtccatggtaccacgtctccgaaggccactcccggaatgacgccgtcttgggtggtgaacccgagagagcgagcttgctcggtcaggctcttcggtccggatcttctctagacggttttgattggcttctagggcagtcgaagccgacgatgaaagagcagagccttcactaggagtcacctttatgtcaatcgcttctgtctttagcgccgcgactgggctagggactggtcgttgattggtagctgtgcagtcttctgatagattctctcgacggtgcgtggcgcccggcatatcggaattagctcttggcaaatggacatgaccacgagcatgtcgacgatgatgatgaatggcaggagggctgaatacctcgcggagaacctgctcctgaagcttgagattgacggtcgtggcgccccagatcttggcccgcttactcataggcgatgtatcagactccgctgacatacctttcagaccgtcaacggatcgtgcgcggctcattgaagcatctgctgtccgcggtcgctgctgacgagtaaaaagatcggcaggaattatatggcgattgttctcaagaatgaccttggggatgactcctgtgacttgggactggctaacaattcgctgtggcggttgttgctttgctgactctggaggctcagagctgggcgttgaagttccattggctgtcggatctggaattattttatcggcagaatcgacctggtcctttcgtttggatgtcttcgaaaaggtgacattcaacactccgatgtacctgatcgaaatattagtatttaatatgctgataaccgtctgatcttcgtggaattgattttacatacttgggaagaaataccaacatatctgggtgcctcagttcaatgcgttcgtagaactcgttctctcggttgttcaactgcttgcatacagcgcgtctggaaaagcggaaaacagttgtgtgcccgccaacctgatgtcgatagggcttcaattccacggcaccaagaggccccgggggcgggggtttgggacgagagagaagccgagaaggctgggtgggtgtggcactcggggtttccacctcgtcagcagatgggatactttcatctgccgattggggttcgacttcggaatcgtagattgaatcgctgcattcagagatggtactcaaaggcttttctggcacattctctcgttgagaatggatatcgccataaaggatcttactttcattcttagatcgaaaggatatatccacatggctgatttcctttttgggagaatcgctacgctcttgaggtactaacatcagctcatgacctttctccgcagccgacagctgacccggctgtacatgaagagggctatcgggaaattgttgcaggccctcaaccccatcaggaaccgtacgctcgtgggggaagtaaacggcagaagaaatctgctcgttttcttcctcctcaacctgaccacgctcctcttcctcgaaagagttagacggggatacctcggcatgaagatcgctctggaagtagtcacgggcgcgctctgaatattgagtgggaatgcttcttgagaaagaagacccatggctaccaccaggcgtgagatgaaagtttcggatctcctctagcaagctgcgaggcaaggctgtagggccacgcttggaggggtcatcatcgtatgtggactgagataattcagccgggggaggttggaaagacggggcatcgccaagtgcggagagtgatgtgcttttatgaagcgacgtttcgtgctctgagcgatatgattcttgttcatgttccatgatgcgatccctcgactccaacgtctcatcttgtggtcggccgcgatcctcccgtcgtttgcgatccggtgaagaagcagtgttttctttgaaaaggcccaggtagtggctagacttacgactgcgcacgttagaggccggctccgggttggtaaaattggcctcgatcgagctgtcaactcggccacgacgacctctgctggggcttcgctcaagcaccacaggggtctgaggtttttcttctttcgcactgtaggataagggatcctgactgatctgagagccctcgtggccagaggttgggatagtcaaagagtgagaggtagagacatcatctaatgcagacgggaacaatttccgctcaggtaaagtgccttggaaccgactggtcttcgtacctgtgttatcccatggcaccttgtatcgctgggatccggccaaatgaggcggcgcacccgtctcgacctcggttttctttgagcgaccagtcggcgaggtcggtgtgcgcagcagagacaaacgagggaggtcggtggatgagaagagggtcgaggaacgcaacggagaggttctgtggacgtcaacttccatgcgggaagggtcgacgctataacgatggggagagaccttggagaatgcacttggagacacggatgcatcgtcaaggctagggatcaagttgacctggcgttcattgcccaaggccttttcgggggggagttgtggggtagtggcggcactatcagaggggaggtaatgagtagcgaagatactgtcacgttcggacagttgaggcctgtagacaatatcaggctgcgcggtgttctccggaggtgtggtagcggttctttttagagggaatattcgggagacgggctgagaccaggaatgggcggtgggggattccgcgcgcgacggtgataaaacctccccagagccccgagacaaatgagcttgcggcaaatggtgacgtgggccacccccgatgatattggagcaatcatgttgggccggtgtagcaggtgtcaccaggggactaggcaaggtatcttcgggaacggacggcgagtttgacatggggaggacattggtcaagcacaggacgggatggtatggaagcggaaaccggaatggttgggcgtaagtaaaaaaaaaggaagatttaagactaagagagaagcctagaacaaggaagaaagataggcgggttagaggaatgtctatctattggcaatcaaggggaaagagttatgggcacgttgaggcagacagagatcttacaggctaaaggaaaagccgcaaatcggtgagaaggccggaggatcaaaagagtcaaggggagttgcagggaaagggaaatttgaagtttgcgagagaccagccttgggatcgtcaccgcccttgagtggatccgatttgggccaaaattgggataaaaatgggatgaagatgatattggagattgagaaggagaggaagaggcagatcaaggcaaagaaagatgaagtcataagagaaatatatgggagtccatggcacgagacagtccaagtacagcttctatgagtacccggcctatcattgtgcaacgtcttacgaacttcctgactactgactgctagggttcccaggctagagatggagattattataatagattgaatcgagatctcgggatgatattagggatatttagaatatttagggatattcaagaatataataggtattgtacaaattaccaagtaaactcccaaggttctctattataagatctatcaacttctacaaaccaaatatttatggctatatcttttgattcctatctgccaatcatctgtctcaattcatagtgtgcagccatgtcgatcgctaataggtgattcaggggatttctgtaacttgacatctcgacatcttgacatctacaacatagtatcctaggacggagtactgcataccccgtaccttaataaatactagtccagtctggggttaagctcgtagactaaaacgaccaaggcttttcttctcaccagatggccccataagggaactaaaagaactaaagcccccccacttcgaaaagccacgcagtgaccttatctcccgcggtataaaaggtaccatagatatgtatggatttatactggattactccctattggtaacctcagcacacttgattatattcaaatggataatccaagacaggaaacacacaaattcaatccaacagcgcctaagatgtgattgtgatgagataaagtgattgggagccgagcgcgtcgtgacccaaccagagtgctcggcgatgtgaaacagatgcattaggggccacggaagagactaggatggtgtttctcaacgaaccagcttcttcgtagaagaaaaggagaggagatccccgcagacctccgacttttgtactccccgctgacaaggctcctatggtctacgactccttagtttactgtcggcctccttccaccatgcgccttctttcacacttgaggccctataggcactgggaccttataccttccatttcccatcgcatgtccttgagcacgttctcccttttcgttcatcccataagaaagccgttgagtcgtatgtcatacaaggttcttccttcaattatctaccttgcgatcaaggccaaatctactattttactcttgagaagatctccatcagagttatatctattcacttgataggaggttcccgagaaatatactgccttcaaaaatgagtcgcttgaacgtggatacaggaggaaatcacgagaggtattcgtttatggaaacaccactcgaaatgcacccttcatcgcaccaacagagtctatcagcacttcctccagcgggcgcgaatgcgcacccacagcatcctgcagtggacgaacagcagaaagagcgacagcgagcatggtcttatgtaccgagtgagaaagaacaatttcagcatcaggggataatcccggactatgccaaccgtccgcccctcgagcagcacccggccaattatgcgcctttggttcaaaaccaggaacagcagcagcaacatagcacttcaatatctcctcagacgtccacaatcgcgcccgagcagcaacaacaccatacccaatcctataccagccagtcttatacaaacgtagccgaacagccgagtcacacggtgtctccccagacatatgcgagtcagtcgtatacaaatacaccagagcaacagcagcatcaatggcaccaacagattggcatgaccatatctcctcagtatgcgaacatacccgaacgacagcagaacagcaccccgatgtctccccactcatatgcgagtcatccatatgcgacgcagtcataccacatcccgaatcaacatcgcgacatcgaaataccctcccagcaatatgcctcgtataccgaaacccccagctcgccacccccgaactcaccagggccactgcccctgaaagtaaaccccgaaggtccaccacgaagcgaaagcgtgcccattgttcccgacgagaatcccctgcagtcacccatatcgccctattttcctccgattactagaccgaaaacatcgcatgctccccagccggatgatctgagctcataccaccagcccggccaaacaacccatccaaaccaggagataaagggcggaggatggagcaacagactgtgcgaattttcgaatttcggaatctgctgtctaggactgctatgtccgtgcattttgtacgggagaacgcaacaccgactctcgatgaaatcgagaaaggaagacccgaccaacatgctcggctatgagacctgcaacgggtcgtgcacggcgatgggactactatgcggatgtcaatgtaagtcgaagtccaatttcaacctcagttttaagcttgagtgaatatcgcgaccgagcaaccgagaaagaaaaaagcaccattctgacaccagcacaacagggttactggccacggtccaacacactagaacgagaaaggcatatggcatccagggtagtatcgcatcggactgcgtgagggcaacctgctgtacatgctgcacattgattcaggacgagaaggagatccagaagcgcgaggagtatcgctcccgagcggctagggaacgggggacgactctgctctcgccgtatactactcccgggccaatgtcgtatggcccgccacggagataatgcgccatggttagtgaagagcggtttcgatggcgtggagtgtctctatgtatatagtttatgcattgtgatgtaatagcgtttattatttgatgtatgtttttatttactcgtagggacagaggaatccgtagcctgtcagcattgccaatctaccgacaagaattcaagattgaagctggcagttacgtatgaaatctactgctctcatcaattttgcagataattgcatgcggttggtgagatgtgattcatcatattgccacctacgttggaaacagggcatggtgagggttgagatcaggttaggcacaagcagagaaccaaacaggagaaatcgattaaatctggtagaatcaacgagaaaatgcatatcttcatctctaagcatttactagcttaacaaccaacgtgtaatcctatggccataggtatccactcaagctctatagtttgaaagccaataattgaaccctttcgcgacttttactagacatatgtccatagacgagtacgaaccactaaaccctcaataagagtactcaagggtctcgcccaccacttatcaatcccagaccgggcattcgagccatggcagcaggccaccctccaaggtatggaaggtagcaattcagttcgcaatttaaggtagagtacagagtactaccgacacctagtcgcccctgggatgtatcatatcaataaactcaagagaggtcgtgcgatcccacgatcggacaaaccaaactggcgggtcgacaccgatctcaccggggcgatgggtcgatgcgccacgatgatccactaagtggctcacccattccctctgaagagtctacggagtcccttatgtgtatccgcactgcaacctcggctgtcaagctagccatggtaatatgcaaggcgatgcattgaaggggcgcatggatcgtagatatcttcacgtcaaagctgatgtatcaattggtaacgggggatctcttcctcggaaaaggttgatactagtcgtcaaagcccttgttgttccctgagtaggttttgactagttgcactgacgttggtcggctaatatgtaagggtgggatatatatcagctactactgtgggagagcagccattccttaaggttatatccaaggtgagacctgttcatttgttcgcttctgtgtatatagttgatctaggattcctgcgtcacgctgatatcggtgcttccactcatttggagagtcactctctatacttggtgatacgtgcaatatggcggattcagtggcccagaccatccatggctatgaccatgataacttgcgccatgtggttgtcacctcgacttgctttgccttcatcttgtctactaccgcagttggattccgcatcatctctcggaagatcaacggcagcggtctttttgcggatgactggctcattatcattgcgttggtgagaagcacgccttgattgtttacgacaaggctaacttgcaaacagatcttcgaatacggtatatcgatagcaggagttgtttgtacgtcgaatatcattcacctaaaacagccaggagctaacgcacggcagtactctacaatggactcggaacccatatcgtcgagatctcccccgaacagctcgttatctacttgaaggtatggaattgcatccgattcgctatgaaacgcatgcgtgtactaatagactcacagacactgtttacaggctcgatcctctataccggctgcattgcaagcatcaaactatccatcctgatgctttaccgaagactgttccctgtcaagagcatgaagtacgccgtcagtattgtatctctgattgtgattctgtgggctgcctgcggtattctcgcgggctgcttcatttgcatcccaaccgagaagctgtggcatcccatgctaccaggtggttgcatgaatctgtcaaaattctactacggtcttcaagtccccaacatcgcaacggacgcaatcatcctcctgatgccgatgcacattgtgtggaaccttcccatctccaaagttcagaagcttggtctttccggtatttttattctgggagtcttgtaagattgtactgtctctattcgaagtgctcttctaattaatgcaggactttaatattcgacatcattcgtctggttgtcctgattcagctttccacccagggtgaagacattacctgtacgtggaattattccctaacccatatatgagggctcctcactgatataaaaatagataaccaagtcccagcaagcgtgtggacttgcatcgagcccgctgtcggaatagttgccgcctgtctgtcaaatatgcggcctttgttcaaggtcattcataccaaagtctggtctaggctttccagccgatacgccacccacacgaacaatcccagtgattcacagattaacgagaagggtgtttggccgcgacagacacctagcccgagtaattctcccagtcccagtggtgatttcgaccagtcgcctactcataatcagtctgctgtgtaagatatgatcgggactacatctatatggatcggattttttttgcctttttacgaaggggggaggtaccgtctcattcattcctttttgtcttttgtctttttacctacaacgagaaagccaggatcgatttgttagcaattttctagatctttaagaggaatcgaacataagaattcaaacagagctattgtcttttgtccctattaagtaattttcagccaatcgacaaagtcattgactcagtgcaactagcagtaccggagacatgaaagagtggaataaccacccgaggagaaatgacaacgaaacaaaggcttttatagcctttggtacctttatttctccacagaaaggagttcaatgcttagctagctgaacatcagccgaaaatttcataaatagctcccattgcagcaatttccctaacattcaaccctctaagaataagttccgcactctaattttctttcagtccagctgatttatcattgataagaagacctaggtaagttccaattcccgaccctgcttagctccgagtttctaaaagatgtataactatgagccagcacgctcgcagtggcaaaaaagcttccaaatggagtgccgcatttttgtgaaacaggcagaggctctagctaattacaccagaaaacatccggaaaattatgattatgagcaaaactgcaatgtccatagagggcttatcagactgtggtctcaaatagcgcgagtgaaagacactaggcttgatatggttgcggaaaccccgagatgtcctctcgttctgaagcaacgcagctattggttcatacgggatcttgcagaccagaccgagtttgaagacgattgcaataagatagaggcccgtctggaggcaatggcggtaaaggtccaaacccgcgagttagagaacctttggattgctggagtccttaagtcgacggctttgcatattcaggacaaattccatatatagattatatatcttgttggaattggtgtgtaaatttgtatggattcagcataaattcgagccttcattgttacatcacatagagtttttatttcagccttaatatataagcccgatagcatctttcattgtgacatcaactcaacactatattcgtcgctagtacatctatggcctcatcctcaaattgcctcctatgcggagtgcagcttttgaggattactgacttccaacagataaattcactccgtcacattgatttggtacaagaaaaacaatagaagcaccataagaaggccaagcttaaacatgtaatggtcccatcaaaggaggtagaggaggcagaatttgagaagtatcccaacatatggacatgcatgtgtcgagccagtgagttttatatagtcgcgccctagacccagtttaccctaacagacacagttatcaaagagcccgatagcaaatactttctaagcggtatcactgcacttgaagaaggataccctaatcccgggattattccaaaaaaccccggcatggcacgaattggtgggagaagacttgaaaacccccgatacgacgacaccttcattcgattccatccagcaatactcgaaagacaaccgagagagtacaaacgcaaaaatgtcggattcgttgtccatgcccactgctgggttcttcttaaccacatcataccaacgacactgatcgagagcaaaatggagaaattcgttcgcgctgcccgacaatactggcgtagccgcgaatcgtggggagctaatgattatccgttcaggatattgaaacgtaggcagacgagacttaggattcggtcgggatattggcagtggaaggattgggatccaaaggactccaaatatgcctgtgatatttacaggagtcctctcatagtgcccgaagttcaaagagcaattgaaagcgcaaggaagaccaagaaggaacgtgtgcaatcccgttacagtgacgtgccattggaagttgcgattatgattgccgagctcatctgccctgttgactatacaccggctgatttgaagaacacacggaatatgctttctgtattgcagtggacattgcctgattggttttggaagaggcggttaaaagaggagatcttcattgagttgaactcactcaggggggccaactgttcaatcgattggcagggcctacggcttgatttgatgggtcttgtttttgataaaaactggtatgttttcagcggtttgccgaatcgtgagcgggtgcttggctttatgacgggtatcaagtcgaattttctcgaaaagtgttgagggtggaatgaattaggaggacttgctatattagtgatgtgaaatgaatcgccggttaggtataacggactgtgatggctctttatgaatgttaatactgctatctcttgctacgcttgtatttgtagaggcgctaatgatgggaaaggtactcagtacttatcacaaggtggagttatccgcagattgccacgtaccgggtactttatactaacatcgccattttgaaggtcaggcaatgccgcaatgccttacgcccaagcgaagatgcctattgcccacgccataattacagacgtgaacggttaacatcaaatatgtgcggagtatgtcctacacgtagcaggcgctaagacagcatccccgcccacatgtgtggacgtcaaagctccgatactcggtccaacgcttatccaaaccccgaagtgggaattgggctgcacggtctaatgccaaatgtactttttgtataggatgcagcccaactcccgacaaggttgggccgtgcgttaagccgaatagaggcgtctgcgggttcttaagaggcgttttctcctttgttttttttttttgcctgaatatgctcccttgagattgacgaccttcacgtacacccaacatgcgcggtctcgacgatagcactgatgtatttatacgcactggccaaaaggcccagaaacatgtgcggcttgcttgggagggcttcatcaattttgcggcacgggataacgttctcgaggttgcgttgggtttgatgtgagctctccctatcgcataaaactaacaatcaaaatgctaacatctcaaaagtatagccaatgcgttcactaaagtcgtcacatctttcgtcacagacataattctgccgattgtctctctactgccattcctgaaccgaaacatggatcagaaattcgccgttctctccaagggtccgacttacgaccagcagaatgggtataataccctatatcaagcgagagaagatggtgcactggttctggcttatgggtatgtggacccacctcagatactcatggaaggtctctcccatcgatcagttttatctcacatttatgcagactgtttgccgagacagttctcaacttcctgggtgtcagtcttactctatacgcggtcggaaatatgtacatgatgatctttcccgacaagatcatcaagcctactgtccggtgtccatactgcaggcagtatatcagtaaacaggtaagtggtctgatcgggtgtgagttttacctcggctaatcgttgattgtccaaaggcgcttcgctgtcgccattgctcaacatggcaagacggaagggaagacgagcctcggagtgataaaagctctcgcgaggaactggctggtgccgagccgagtcgtgctgggcaaatttcctaggttgtactagatgacggtggatttgtgaggtactgttaccctcatgtgcgcccacgtgagggtaacaggtacagacagtttcccgttgcaatttttgtgcagttgtttagcgagtccgattatgcacgagtagatgatgtgatttgatttattgttgttattgatcgagggccgtgaaaacctcggaaagaccgttggatttgatgaattgagatgtgaattgaatgtacaagaagctgtataatacagacaccagaatgccagatctagatttctatacctctatatcgaccaccattcgaattcagtcatatcctgtaccggcaaagtatgttgcttgcggcgccacgtcctgcgggcatgcttgatgaacgcgtcgggaggagaccaggctgcctcccaggtctgagggtgtcgcagagtggttttagattggagaataccaaagcggaaatcaaggggattgaaagtccctggaggagacggcagtcgcatgtagtagcggacgctgtcgggaatctcatcggccacatggctagtcatgatcaaggcttgatcctccgtgagaccagtgaaccggaattccgactccttcgaggagcgggcttgaacattaagtgcacggcgtttaggtctctcgccattttctaagaaatgcaagcacgcgttacgctgtgctgcagataggcccgagaaagcttcgtcgagaataacaatgtccggcttggcgacgatggcccggaggaaaagcacaatgcgttgttgtgcggtggtgagctcactgaagagaatttcatctgcgtatccaacaatgtgatccattaacgcgtatgtacctagcttgacgtgagtccgcttcgtgagtgacgggagaccggcagtcgatatttttggtacctcgcccggggcgtaatttggatccagatagggctggaagaattgcaggactgcggatatatcttgatcgcgttgaatgttcagcttcggctttgacaggaaggtctcggcgaaggcactctcaagtgctgcacggattgataattgacgcgggaagaacgcatggatctccggtgatgaatgtccaatgcgggactgcagttcgaagattgaaattcctggtttgccaggctccggaagcctggatcgtccgaaaagtttgacaggctgtgcatacgcttgcggatggtcggatgtgaccattgatagcaatgttgtcttgcctgacccgttgggaccaaggatcgcccagcgttgcccccgacgtactcgccaatgcagcccatcctttgcttcgccatttacgttctgttgccaattaccgagtactaccttatccccgtacttgacatgaactccttccatatcaatgactggctctccgcccaagggtgcatggacttctgtggactttatctcattcgtatgcgccactaaatccccaaggagttctttgtccaaaacaccagccttcaagtctgctgtacatttctccaatatttccgcttgctggtcgggtaaagagtccggcttagatttatttgcgacgtagctccagacattgagcgtgtcttcgatagctggctttggcccttgcaggagaaccttatggtcattgcccaaaatcataatgtgtgtgatccagtccggcaccttgtcctgggggcgcagagctagaatgagccgcggggcgctcttcttcgctaattcatgaagaaggttagagatcttcctcactgccaccgggtccaatcccactaagtagaggttagaatatcacagccatcgaatgtgaatcagaaacacttactgaatggctcgtcaagaagcaatagctctggtttgcttagaatagcctttgcaattcgcgctcgacgagtttgaccattgcttagactcgagactggcaagaggagaagatttcctagctcaagactttcaatggtccgctggagagagagttcatcatgtagcgtgccattttcatcgccctccatcggattcaaggaggtctgcccacgcaagtattgcagcacggtccagtcggtttcctcccggtgactctcatagcgagcactgagatatgcgccacggacccctccaatggcccccgagccctcgccgctgaaaccaacatattggaccgcattttcaatcacgcgtagccgtgggtctttttcggcgatctcgtctgtgaggaggtacggatatgaacgtgccttgggcgggatacagatgtgttggccgcggaggatatgcaggaggtcggttcgaccggctggaccgattatagcccagtgttgcggaggtgcctccttggttgcaccgttaacataaatagcgggcagagtgaagttcaggtttgggaaaagaggtggattggacgtgtcttcggaggttgggtatttcttgtaaaaggttccatcttcaatacgaaggaatgggatttcagacttgaaacgggtcgggcggtaagccgtgagccgcaatgccctcggtcgcaatttcgttcggagtagcattgtcgccatcaacttcctggaaacgtcgcaaaagtgcggagattggagattggagattcggggttaacatttacaggtcacgtgacctcaagctgattcggccgtacctgagcctcaaacagatccatgattcgctacaatacagttacatggtagagatcacgaaggctgtatatttgcaatggctaataatcgaactaggacatgatatcaggacttgtcccattatatcatgtgaccatttcaatgtccacttttctgcctcatccgaagcagtcaagtaacatcaacaaccaagtcgtagataactaatctgaatctgatattgatcatctctaagcacatggaatattctctcggagattgaaacgcctgaatacctcacgtgactgttccgatctgatcgcatccgatcccggggccggatagccgtctgtttcggatctgcatcgtgcgggnnnnnnnnnnnnnnnnnnnnnnnnnnnnnnnnnnnnnnnnnnnnnnnnnnnnnnnnnnnnnnnnnnnnnnnnnnnnnnnnnnnnnnnnnnnnnnnnnnnnnnnnnnnnnnnnnnnnnnnnnnnnnnnnnnnnnnnnnnnnnnnnnnnnnnnnnnnnnnnnnnnnnnnnnnnnnnnnnnnnnggggggggaggggggagggggttgcatagcttgacatttcgacgtgtcttatatctgctgtctttgggacaatccgaagctcaagcagtggacagaaatacttggaataaaagcaacatatatctattatcatcgccggcaagtcgtagtacttgaatcctaatataaatgtaagccgacggctaatggggcgggtgtggccacccgacggccaaactctcgggacccgattatcagaggtcgtcatggaccttcccaagcttatatagcctgctcttatttcatttccccacaaagcttccgcgcatctgtgctttccacctaaatctcacgtggcaaccacgacgcgttcatccgatatcaaatcgctgtgaatctccattcgaccaacatccaagtgcaagtatctacgcagagagaaagaagcaacatgccacccagcgcgtactccccggtccttgagaccagtcgcatcttctctgcgctgtgtgaccagtcggaacgcttcgacttaccacccgaggttcttgcgaacaaagaccgcgtttcgttctctaccagtcataatgaaatctacttcccaattccctttaaagagaccgagactctcgctgccctgaagggtatcgaaggttccgtggctgcggccattgccgacctgcgcttcggtgctggtgaggaacctcggggcattcaagtcaacctcgaagctgccactgcctttggatgccaagcgtacatggcaaaggttgatggtctgtcaaaattggacccagctgtgaaaacaaagctgaagagtatgtatttctgtagagactgatatatgggatgacaaaacaatattgactgtaacagacacggatttgctggctgcccaatccaacggctaccgacgtatgtcggcgaatctttacaagactaagaacccaggcgaatacttccatatccatggctctctggaggctacaaccaccttgaacatgattgggctcgagggccaacgaccagacctgactgattatgaagaaatcatcaaggtcatcgagagcaaagtacagcaatacacagctgcggagcttgaagatatgaacaaagagaaacgccaggccggtgtgactgcttacaaacatgaggactttatcaagactccccatgtaagtgttgcatgctgtatccgaccgcaacaagcaagctgatcattcgacagggaaaacttaatgtccaagagcctgcatggaaagtcagcaaattgcctggtgatcttcctccaactcctttcccagctagacgcaacggcagcaagaagatcctcgagggcatcaaagtactggagctctgccgtatcatcgcaggcccgactattacccgcattctagccgaatatggtgccgatgttttgaagataaccagcccaaacctttccgatgtgccgtttttccaagtcgatggtaacatgggcaagattgcagcagatcttgatttgaagagcgaggctggacgaaaggagtttgagaagctcctggatgacgtggatgtcatcgtagacggctaccgtcccggagcactagataagcttggctacggagcagaggccatggctgcgttggccaagaagcgcggcaaaggcattgtttacgtgaatgagaactgcttcggatacgagggcgagtgggctggccgcgctggatggcagcagatcgcagattgcgtaagttatcacatactgtctctactgtccagatcaaaactgacctcggctacaggtgactggaatcgcctgggcccaaggccagttcatgggcctctcaacacccgttgtacctccttaccccatctccgactacggcacaggctgcatgggcgccatcgccgcgctgactggtctctatcaccgcgcgaagaccggtggctcctaccacggcaaagcttcgctcatgcactacgaccttctcctctttgcaatgggccaataccccgctgatgtgcaggaggagcttcgtaaggtgcaaccgcctgagttcttcaagttgcgtcactgcgacagtgttgaccgcatctcgtcgaccgtgctgaagggcatgcaggagcgattcccgcacttgtacaagcctgccggttctgagtcggaaggtcgcaagccattgacagagttatggacatcgcgcgcatatggtgcggatatcgagattgtgaagccagtggtagtaattggcggggtggataatcagtttgtgcggtctagtcgtccgaacggatttgaccgagcttcatgggaggagtttagcgtcaaggagacagatgtgaagaaatgctagtcgtttccgcactgttttccttttcttttttagcctttgaatacgggatatgcacttcctgtacgtagatcgcaattgaacaccatctgcaaattacctcgagaaaccagaatctctgacaggaggctcggtctgacccaatcgaagaaattaggcttatatgcgacatagatccccgcatgattcatcattattaatttaaatagcttcacaggctggttggaaattgcggccaacggtagacatacccaaagtagttagtcgagagtgtgtcaaaaaagcaaacctcactaacaaacggtgctagaccagccggtctcgcaatgcgttgcgcctacataagcacaacaatcccacctgtctggcgtatgagctgcgccgagctgacgactctcagcggcacagctgtaatcattctgaatggcctgtggctggtcgattgtcttggtgtgtatgacgacctccgagactgtggatttgatggtgtacagatgacgctgcatttgttggctgagagtcttaagaggtgggattgcgtgggctagggagaggattggtcatatgaatccttgcatggcgaataaggataaggttatgtgggttgtgttgtatacgagtgtttctagggctttggttttagataaatagggaattagacagcggcatttggtttatggtattgatgaggggaactatgaatgtgaatatgtgctgttagtcaaggatgaggtacaatcgagctgttcattttcttgctcttgggcgtatgctatagtatcacgattcacgacatggctaacgctgatcgcgaatctttagacagcctccgggaaattgtcggaggtgaaatttgtatattcacaggagagggtatccgttataatgtgggttcgataagcttcttcagcttacgaagagagagaggtttgatcaagtactcgtcgacacctgcgatcactgccgcctgttgcatggtagctgaagcgactcctgtgacagccatgatgcgagagggttggagaccgtgatctttttcgtgttgtcggatcttactggttgaaaccagaccatccattataggcattgataagtctagaattagcaaccacccagttagtattttcgggatgagggaggggtgtttagcagagtagtagacgaacccatcaatatcaaatcgtatcttcgacttgaactttcaacaagttccaatgcaatcagtccattagaagctgtgtcgtaactacatccaagttttcgcatgagcgtagccaatatctggttgtaagtcagacacaaggaattaatggaggcaaccgatatacagaaaagaaagggtaaattctgcgtaatcgagtttgcagtgagataacatacccggagattgatgtcattgtcatctacaattagaacatgcatatcgttcggttgatcgttcgatcttatcggagagcctccgataggactactctgacagaccagttcaactggaggctgttgtggaagaccttccggtatttctggtagggtcgacggggtaggttctgacagaagaatttcatgggtttttggtggaacggtaattggaggttcagggccgcgtatttgaggttgtaaattgtgcagatgcactattttttgagctgtttcatagattttctgaggtccgtatctgcatcaaaagttagctcagtaccgcaaaagggggtagcttctggacgtacggctgtgacatcaggatagcattcggagcaagagagtagcttagtgatgatgtcgtgctgcccaagacaatgaagaatttgaagtcatggccggtattcatggtcgagggtgattggtcattcaacctagcgttgaactttgcctcctcgataaccgcgatatcaccctctcccttctcgagtgactctgctagtgcgacatgccatcccagttgtacccccaaaacattggcgagagtactctgaatagaaagctttcgtttcgcatcggagctcagaatgccagtgggctcctccgtcaagtcaggacagccactgaacccaatgaggcatgccttcatagtgtccttgtgtctttgcacctccggagaggaagcatcgtcgaatggcttggtagggagaaggttcctcggacgccgtacggggatgtaaacatcgacctgggtaccaacaccggtttcgctcttcactttgaggtgaccacccagaaaggtcactagcttacgcacgacgctgagtccaagcccgacgccttctgatagagcgtcttcctgggcgaatggagagaacgcggagtttctgagaaagtcctgtgaaattccttggcccgtgtctgtgacacggaggtggacaatgtgaggttctgcttgagtttgagttgcggtttgtgacaatgatacctcgacgaggccggtctgtgtccatttcattgcgttaccgaggaggttcatgactattctcctccaggcaccagcgactgattggataatccaggacctggactgctcgatgtttactaccactgacaattcatcggtaccttgagtaatatgagaggcggattgcgaggacgaggtagcagtagctatttcactcgcaagagacgacacaggcgcgggtgcctttcggctggtatggagtataacagcgacttcttcaaccaaggaaccgagattgaagtcggaaactaagcttgttccagaatcctcagtgttggtcacgctgagactttgcgtggttgccaagttgttgattttacagtaatccagccttgtattcgtcagtaaaaggcctcgcccgatggactgcgagtgaaacctacaggtgatctattgtgtccagcaaggtcagtcccgatgttgagatcatgttaaccatatcacggtgcgcagtctgaagcggaatatcatgtagcaactctgcgctcgcgaggatgccatgtagtggggagcgaagctcgtgactaatagaagttacaaagtcaaatttcgagttctcactggcggtccagtgtatccgggatacttcagagatcatagaatctccaaaagccttaaagtagtgtaggtcttctatgcctaaaggacgatgacttccgtttacccatgctagtgtacctgcgagccatcgcgatttgttccaatcccatagaggatagaaaagcacactcttggctccagggagctgatgagctagacgatgggaaatctgctcaaagttctcaaaattgggatcggaagtctctggatttccacatacagaatcaatggggctggccggattgctcctgctgtctatgttgaatatgtggccatctgggaagtgtgtaatcaacgaatgcagcaactcttcagtcaatgtgaccgggcgtttggactcaaggttgctcttagttggtttgcagcttatagcctgacccaaagagccacaatatttttctggatctttgggcggatttggattaggaagatcccaagggctagtaggcgcggtgggggcatctgtcgcaaactccggcaaggcatcccaatcatcatgccgtccagaaaattcgctaaaatagagttagaaactgtcaatgacccaaagaaagagtgactaacaattgcgggtcatttcggtgggcatcaagaaagaccacggcgtccagatccaaagactctttcagtaggagactggcacgggcaaaaatcgcagctatgcgttcagtgatagacacattggctggcgctaatgattccgggggtccttccacggaagatgatagcggttcgtctcggtccgaggttcgagaaagcgatgatggctgtgtatagtttgacacggaaggcatattttgagaaaagatcgacgcttcttttccattgaggctggtagacgaaccttgatcaagcggtgaatagacactaatatccttttccgtaggcaaagaaacgatcgttccacccacatcgcttcgggtggttattgaccccagatcttcagaattcagtttcttcgcagatgcttcaatctgaccttgagtggaagagccagtagggtcaaatttcgaatgacttttgacgaagtttgtcaatcctttgaccaagttctccgaacgacgatgatattgaacgatccgcgcattttcaaggtggtttgagattgagtcggcaatctcccgaagagcagccacatcctcgtctccaaatttcgttcgaggcttgttgtccactacacaatatgaacctagtacgaacccggaagggctgtacaatggcacctcggcgtagaaccgaaagaacggccagccaaggacatacgggcgatctttgtagaaatcctccttggtgaaatcgcggatgatgttgcgtgtctggttggccgttatattctccgtgtctagtatctgggaagtatcttgtccagtgaaaagtcgaatggcgtggggacacactccccattgcaagtccagtgtattgacacccaggaatataccatcatccgcgcgatgaagatttttgtttcgaagagagatcgacgcggttgcctctgaaatgacatgctgattttctccgtcgatgattgaaacaaaagaccgattgcatccaaagcgatagacacccagttgtgtcaatgcagtcagggtggtatcatttgaaaggcgaggggatgttaagtcctgtgagatgtcatgttgatccgggtctgcgcttgtagagactggctgatcaaaagtacaataatacctatagaggttgaggaaacgttagtagagatcgcaatcgggcggggaatcacaaactttgataaatcccggattctctcttgctcgacatcatttcctggctgacccattgcagatgggccagctgatctatagctggtcacttcgacataagactgaagttaggaagttctcatggcacatatgttgtcggaataagaaaagaaaacgggtttacgaaacctgttttagggaaatccctacgctatgtctgtggtggggcttaggcctctcggtaagagatatttatgggggcttgggctagaatattccattataactgtattgattgaggctatattcattctagggacatctacatacaggtatctaggtatactaggtactcaagtgtattcaaatgtatacgcagaagctgaagtggcgtactggggtgatatattgtaccagtgacattccactagagtacccgtgatatctccaccgtggtgttcgacatatcaccattaagctatttagatgaataagaataacggtgtttttcctcgttttactcttttcatttgtctttttgcatcctctttttataggtatcgcctctccattcataatttttctagatggcaaaaatagccgacccaatctatgaaaccttggagacaaccttcgatgattaatgactccaccactaatagagataatctgatttgaaaaacatcattgaaattcgagatggtagagagtatctaattaatcaaatgcgaccggtatttgatactagttgtagcttaataggtcatattataggtgtaaatttacacaggctggttgaaattgcggccagcggtagacatacatacccgaagtagtttagcgtggagtgtgtagcttttctttttatgtggcgaatcatcttccaaggtttatggcaatgcgtcccatccaatcagcttcgagatacgctgatttgcatagttggctaggttggctagatttcctacaggaactggatatggccaggcatgtgctggtttgggccgtgctgaccttgcatagttcggacatgtggtggctttgtgtaaccgttagaggttgagtttctttttagttcttgggataattggaattgcaattaggatttggatgcgggtttgggtatcgggtatttgattccatatatatatccggcctcttgtacttcataaagtatgtccggaaatatatacccccgcagaggtggaaatacaagacagttatactgagggatttgtctctatgcgagaatatgcatgagatacaacccagactagatcaacttgaagcacgaaaatagactaaaccagacaaatctaactgcttgatgtcagcatgtccccactatgggtggagaaggtcagtatgtatttggaattgtacggctatcacgcacatcagtgttttctttcataggggtaaatcttgccatagttgcttcctataggttgcttaaggagaaactgctgagcgggtaccagcaggttcatagcgtgcgattccaaattcccccagaagcgccgacatatgtacacaaacagggtccccctgaataaagctttcaattcaacatcccttcgaaagtatcaaaaaagaaacaaaaaaggatctcgctaataaacgccacgagccggagaggatatatcgcaagatgctcaaaagatacaagctcctagatgagaagcaaaaacacacacaccacaaacaaaaaggggccaaagagaagaaaacaagaaacggaaattaggtatgtacagtccgaagacagacaagcataataccaatcaggaatcaaaaatcgggccaaatgccggggttcctcgacattcaagctcatagacaattcgcgccgtcagcacagggttactgatcacgcacaccgcttcagcctggaagtccttgatctgctgcaggatgatgggaaccatgtccatacggccacacttattggtgtctaggatgataggggctgaatccattttgtggactagatgcatgatcctatcgccgtaggtcttctgaggagcacgagtttgccaaagcacacgcagtgcgggtcggttgtcatcaccgaggaatgacagacagggtccgatgcccgatccggtagtgacaactatcactctccggaaaacacgcatggcatatgcaaagccatagatcaacactccgcgcttccagaggtgagtaggcgggttctgaattgtttctgcagtccaatcaccagctttggacaccaacgaagagaagcttgggttgccgtggacgcctgcgggtgtggggtctgggaaagtggcaaacccatgccaatcccgaagcgggtgcttggctagttggatgccctttccaaaggtggtaatagcatggtcgaaatgcaagcgggtggcgtgagtcgagagtggctcggcccgcactgcgaccttccgaaggaacagccaaggctggataatggctgctacagtgagcatcaagaaccagaatgctggcagctcgatgatgaatgttccaagtggttggcccgtggactggctagcgtttcgagagaagacgatcagcagggcgacaaacaaggccacgaccagccaccccgaaaaacggtgagtgagttcgaaataatcatgccgtttcattcggaatgcggggtgggacaccacgatgatcgccagcaacaggaccaatatgacataagctaacgcaaccggtgctgctgaaataccaatgtccgaaccatcagctgatggcttccagtactggtgggacatcacgcccacgaatcccacgtaccacacgagggcagcgactccacagccgctatggacaccgccatagtggtagacttttgcggcgatccgacggaggagaagcggcgctgagcgcggcatcgaacatacgatgacgaatatagcattgaccaccagtggctggcgggccaggccacaggcaagcaaattggcggctgtggcattgaccaaggccaggagtttctgttcagtgctcatgatatacacaaacattgcaacgtttgcgcagaacactagcgtgaacagacgccggtatagtgtgaggatggcatatcgggtagatgcaaataacttgggtttgcgctgggtctgtgcctccacatcgatctcctttgcgatatcgaagtgtacggattcggctcccttggaagagcacttttcatcgattttgtattcattgatgagagtcgcctcgctcacagtcggtgtgtgtcgtgcaacgaccacctttggaggcatagtgatgggggttttctctgacataactatgatgggttcccgaggtatcacactggctcatataaaaagttcaaaagatgactggaagttgtgatgaactaatcaagccagggattccttgaagtgaaagagactgaaagaaatagttgacaacccaaccagggcgagtcctccattttgaagtgaatcacttcaaccaagacctttgttttttctcctctctctaccaatatccaccaagatcagcctcacaccccttctgcatggcgactttcacgtccttctttcccaatcgagtttgtctttccattttgggcgtcaccaggcatcaccgcgaacggtaacaccctttcgcatctgttcgggtctattcggccatcaatcgttctctcttttgagtttggctctgaaaatgaggcattcattgcatatgatcccattatttggccattttttccccattcggttgttgttcccctctcggtgtatgacactatcacctcggggtccaggattcacactattgcaagtctttgttgccaatcagcatcaaagaaccatcctactcccttgctttcagcttcacacacacctcgggaaagtgtctgacgcaatacctgaaagactccacgcagcctgtcagaaccttgtccgatcctccatcaagagggggtggatctccctttcggggatgaaccggaaagggagatcaaataatgcgctcattgaggtgcgatgcaacctaattcccagtcgatatctccacaataaccaaaccgaggaccagtcaaggcgagatgcgcccaaacaccgtcacggaccaagtgcaaccggaccagggtcgacttcactagtcctgatgggatgcaagcgctggacatgatggccagtgcacctgatcatacggtcaagaaagccttcaataaaagagacgatctgcagcatagggatagcgttgactagccacaattcctttgtaccgcggcatcaacaaggcgaatgtggatctatagaggtgtggctgaatcgtgccatgagttaatgcaataacccgtcggatgataaggcagttcatgtttttttgtttttttgttttttttgctttttattttttttggcgatttttgttttcaacgctacgtctgcgcggtcgatcatgatgcagctgagggtgttcggctaggtgccatgaccacccctccgttatctgactcgcacggcggagttgtatgctgatccttacccaacgccgaggtactggcagcgatgcacgggtgcagtacataacctagatgggtgtggagcacggtttcgttagccgatatttcgctagtcgatctggatctggaatccgggaaagaaaccgtcctcagattcaaagtccatgaccccacagccaaggcaacaatataccgacggtctccactgaatatcagctgcaggtcttgggcatccattgcaatattgggcccataacaacgggtgggagtggaaggagagtgcatcccttcacgggacgtcagcgatgaatgacaggagcggggaacggaccacgcctctgatgtggcagcaggggttagattagcctgaagaatattcaaggggaatcgaaccggcggaacagcgggatgtagcacacccctgcctaagctcgtgggcgacctgaagaaacagtttagatggccctaagaagggaatgtgagttcatcggattagagtttggagcatatctcacgatccggtcgatctctatgaacacatttccaaactatatctcacgcaaggcaagggaaaccgtcagtcaacatggggacacggacgaaagggtgatctgatggtgtggctcagctcccaagggctagcgaattagtgacaagcaaatttaattattttcgatctatttattggattttgaacccgccacaccggatggcgctaagcacgcctggtggagacacgatatagtacaccgtaccctatgtactccatagtgttgtgatccgattttgcgatgacatagtgtgattggctttacacttttgattccttgctctggaggttcagctttttcagctccttgtttttgaggtctgatttacgtctatctcgtatagtaaagagttcaccttacagttgacgcagtggagactaaacctcattacataagccatgtattccaaatcctggaacaaggtggaacaggccggggggcagaggagatgtcaaggtaaattcaaatcaaagagaaagcaaaatggaaaatatacatttacctatataacccccagggatttccatctggattcattatatactacacctcttatattacttctaatcctaccaaaatgggttacacatctatggctttgaacaatatgccctcccaggtctactcggacttgctgagtttcactttcgatggtccaaagccatacaaccagaaccaaccgctgtttattgatgccgaggatccgtcccggtcatttacagcggcccaattccgacaactagtccggaccttgatcgctgggttgaaagcccacaatgtccagccaggggactgtgtattagtacacctgggaaacagcgtaagtgaaagaagcacaaagaaaagaacatccttgaagtcggaagttcaatattggactgaagattctcggaaaataaaagaagcaatgctgactcgggcctgtcatatgcagatactgtatcccgcactcttcttcggtatcattggcgccggtggtgtctatatgggatcaaacccccggagccacccccaagaactcgatcatatcctcagtctcgctgagcccaaactgatcctcacaacccgcgatgccctcccctccatcctcgacgtctccgcggcccgtggcatccatccagcgcaggtctgcctcgtcgatgaccgagccatcgaccactgcgcacaactattcctgtggtccgaactaggatattcaccagcaggacagttctgcgccatgagtggcgacgcgcgtcacaacagcttcgcgaatttactctgcttcggcgaaagcgactggttgaaattcgccgaccctatcgtcgcacaagccacgcctgcagccatgtacccgaccagcgggacaggcggactgcccaaagcagccatcttgtcccactatgcgcttgtctcacagcaccgctccatttactatgaagtgccacacccagttagccggctgatctcgctgcccatgttccatttgtttggcgcactctggacacatatcttccctgtccgctacggacaccccctatttgtcctgccacgcttcgagatcaatgaattcctggctgctgtccacaagtaccagatctctgagacttaccttgtcccggctatcattcactctatcaaccagtcgccgatgggtacccatcggcgaccaactgtcgtcgctgcgctatgttgtgttgctggcgctcctattgacggccattccatgctacagttccgccgccatatcaaccctatgggatatgcttgccagatctggggaatgaccgaggtcggtgtgatattccagacccgctggggccagcagggtgaccctggaagtatcggcactcgtattgccggatatgaagcccgcttgttggaccaggatggcaaaatcgtgcaaggcgattgctgctcgggtgaattgtacgtgcgcggaccaggcctgctcactggatacaaaggtcgcacagacgcactggagccacatggatggttccgaacgggagatgtagcgtacgtcaagcagggccaatattacattgttggccggacgaaggagcttatcaaagtacgagggtaagtccatcgtcgattcccagttccctcatcaacttcacatactaatcattttacagatggcaagtagcccctgctgaagtcgaaagcatcctcctgcaacacccaggaattcttgatgccgctgtgataggcgtgaacaaggatggtgtgggcgaggtaccccgcgcctttatcgtgcggtctcgtgacccatctgtgcgccgcataaccgccgaacaagtttacaactttgcacgccggcaactggctaaatacaaagccctcgatggaggtgttgtattcgtggaagagatcccccgcactgcaagtggaaagatccagcgcttcaggctgtcccagatgaacacctaccgtgagatggtggcgtccctgctatcccgattcgatggtgaccgctccgctgcagtcactgcggctcgacgtggactacccgctccagagatgtcacctgttagtctcattcctgaggggcgggttgcggtttgaattaataaagcggggcatagcattttgcactatctatggcgcatataagttgttcccactcattcagcggtgaagcaatgcggtgaatgagacagggagggtgtttgggttagaacctggcgttgtatatttggtttgtgtatttagtttgtgtttgttttcgggtgcttattacatgttgatttttacgatccagactcaacctccttatgatgtttttaaatgactttaattattcatcttagcattacccagatatcggattctctaaatcgtactacctaactatttgtatttgaaccttacaaatcacacaaaacccgagttctcagacataaatttatgtctagtggtgaaaaaaacctagatgatccccaaagtccgagccacagcatgtatgttgtagtgagtcactactccgtacctcccacaccgcacttccaagccccacttccctgtcccaggccaaggccaagctctcggttcctgatatcggcttgcatccgaaaaccgtacacagaaaaaatgtgatgtataaacaacaactacctaatatattttatggcccgagacagtcgcgttcgcattatgcacatgcaaggtccaacaaagtacgtggggctggatcgaacggaatccgaatccgagatcgatctcgaaaatcccacgatgaagtgcatccgcaccaatactatgcagggcccaggcgtccacgggtggaaccttggaaccccggttccaaggttccctgtaaggaggttccttggtactaaagcggggatcgacggagctaaataggttaattattgatgctcgattaggttgcataaactagttatataccctgctctgcctgaaagcatagatatgacttatttgatctcacgtttataataaagacccagaaagccgcataatatggttactgtaactggtaattctctatatagtcatactgccactcctgcgggagtctctagtcctgcgggaactaacggcgtgctagaggggcatcatcaaatcaacaaatcaatacaattacttttcaaggagcgattaacagcgagctagggaatcacgcacaaagtaccgcttgaaaacaaaacgagggagtaacaatagatcagaggagccaatgtgtgatttgttcccgactactccttactccaccttggagaagctctagaccacttggtccactcagactagctggtccccccagactcctcggtctccctagaccactcggtgtccaaagatgatttccataagcagtagttccccagacagaaaagggctccgtatggaagagggctccataaggaagaagactacatatggaagaccctccgtgtggaagaaccctccatacgcaagagatctccaggtgacatactagtcaagttgcgacacccggatagggccgcgacaggacactaaaaggtgtcagcaaacgacggcttggattggtcgcttgcgagaatggagtggcaacataatcgggggaaacattggattcgatacaatacaactgaacagggataatcgagggtgtaaccaaagtgggaatagggcgtttcaagatagcgttcgcgacaaaattaatgggattcgacctctaggaaccctagtgtccggacaaggttgagcaacatatcatggcgcactggtggccaccacgcagtcttttagcatttccaagaacttttgatttatcagttcaagaagctatctcgaactttaaagacgtgaggagttcggaggtaatcatagataataatacataagtaaaagcaagcgtggtaccagaatgatatggcatgactacccactagtcgtgtgtccatgcatcatcgtagggttcccaaacagcgacagcagctcgacataaggcacatgttctgactggagacattccatagcagtttcgaagtccaacatggtcacggctcctgtctccctttgatataaaacgttgtgttttccagcatcgggcacgtagattgacagagaccgaagaatgcggatggccttttcacattcctcacggacgtgggttcgctcgcggttgctaagttcgtcccagacatgggcgaggatctgtccatccttgtaggggaggacaagcgcccttccgttagggaataaactcgagcacattatgttcccagcaagtatcatgttcgcgaagacatcgtaaccactaggtcgtgagtctgacagacgctcatagacagcacattccgcattagacctagacgaatacacatggtgagataaggaccaggataatagcaatcggaaatatacttacgcccgatcttgtctgggactccagcacttcacgatatggcgtgttccttggtgttcaatctcgaagagagccttgtctgtgtggctagggggtgaaattctccgggacacgtttaagatcgaaatcgctcttccctggtggccgagaatgattgtattcggggtaacgttcccgttcagtccggtcactagactgccctcaatggcatggtctctgagcccagaagggcggagagaagcctgaagatcatcttgaccccgaagctgacattcatgttagcggaaatataccaacaccctttgaatataacttactcgctctgccctgaagtctgaaccctcgatgtagtcatggccctgttcagcaaggatacagaaccccgcaaaacactgccgaacagacaaattcgtatcccggtctcgaatcggtggggagacacagaaggcgaagtcagctgtccgcttgacgaatactgtcccccggtatgtcgatagaaagccgtagcgcaacccgaatttcctcatctgcgccacgagttgacctataaatatgtgagtgatagtagtatggcgctaggatgagttgcacataccaagatggggtaaaatttgcggaagaatcacggggtcagacggagaaaatcgatcgagcgcgacagtccagtaggtcttgagttcgccgactatcttgacctgcgcttgggagtcgttgctgagagtcacacctatggatacatctgggataacgtccgatgttggagtttcaaggcttgaatatctcccatcaccattgccggctgtgaggcgcgcacaagaatcttggcaactggctcgcagacattgttgacgaaccgaccagataagccgatttcatttccgaccaggtatacctcgccgctaggagagtcgatgtgggcaatctggaagttaaggtccagcgatgcgagggctgatcgtatctcctggtcgaatgtagtccactggtggatgaacctttgatgtagccactcggtggagactgacgggtggctcgtgccacgggcttgtcgtaagaggggcaaaggacttgcaagaacttgaccggccgtctgcattttgatcgatgatatatggccaggttttaatgaagattcgagcgggatgaggaaaagaaagagaagagtcgaggggaggaaggagcaagatcatacaattaagcttcccggcactaaaccttgtctggtcgaaatttcgatttataaacttggattgttttcgtatagatattgttgtggtggccacgtgccgatcacatgccgttgcctggtttgccaggcttcacatagctatttagctagatctcgatcgtttgtaggaatctaaccttctacatatctctctcaccgctccaagagctatggttcatgctggatgtcttcatggatgctttgtcattatacaattaagatagatcgaagaaacctatcttaagatttccatttccgattctcatcagtaatcagacccctcctcaacaaccattatttataatatatccatactcttaatccccagcctcaaataataccataccccatccaccacacaccccaaaccaaaggtgccagcgccccaagaacagctgccccaaccgacaactccagaatgcaccaaatccaaatagtcccaacagcaggcgccttcttcataaccgcataatacggctctccattcgtgatagcgataagatgcgcgcccagcagcagagcaagaggaagaaagaccaaagtccgcggagcaggtgggaaaaccagctttggtaagaatgaaaatgtgaatttatcacttgtcaatgggaataaagaaataggagcaggctctgcctttgcatcctttgagctgcgctttgtgaaggagacgatatgaccgtgtgcgaggtggacgaataaagtgaggagagggaaggcggttgtcacggattctttcaagagacttggcaggtcgattctttcggcgtattggtgggctgcgaggtagcctagggtgaggtggagggttgtgagaggcatggaaagaaggattgtgtcgaggaatggcggaagaggtttgtcgggttccgattcggagtcggatttcttgacagtattatcatttgtaccctgttgactattcttggtcttcttttgggaggcattggatgagagatggctgctgatgtcgccgtcggtgtcgaccaattgcccagacgcgtcgactgtcacgaatcgggttccccctgactgcgacggtatgccttgtccttccaccgaagctggaattgatcctcccctttgatgaagtgcgccttgtcgctctgcgatgatgtcatataatgtgcgctcgactgttggtttgtttttggtcggatcattgcgatggggatgggccatcgctatttcgggttcgtcgtttttagaagatccagccgctgcacgacgctgctttcgattccttggtgtttccatcttgctcaggctggtatggagggacaatgagtggtggggggaaaagagttaacaaacactgacgtggagaaattgaggttgaggactcggcgataagccccatcaatcggggttaaggtgagctaagatgatcgccagttggctcataggtctaggttatatttctcaggcttgggatagatatgaaaacaaacttttctaaattcatcattgttgctaattaattctctgcaccctttgacacactcgttcaatacatggactggccactcattcaaccagcctggtatagagctggaccggcaaccacatgcgggttaatcaagctcagattgaatggactcacgtacggattgctgtctgtaatggcaataaagatggtaccattgaaagctgggtcaccttggtaggtttccaggctcggctgggtagtatatcctcgaatgccatcagtggtactgctggtcctattggagctgctggcactattggtgctgttggtgctgttggtaccattgacaatttccagaggggtataagtaatgttcagctgcgacacccaaagaacatactttgcgctaccagctgtcgtctgggttgtggtgacgtagctgttgttgggaccgatttgcttcccaggaagatcccactccaataacaccgtccgacccggggccgagagaggcactgggcgaaccttactaacagcagcgccgcagccattagctgagccagacgagttgaatcttccgaagccttttgctgacttgggaatgctgacgcctggtccgacagtattgttgattccagtggtctgattgaacataaaccctgcagtctgattgaacccggaagtcgtgttgagccttgagatctgatcgccactcgaagtaaaattgtacccagtagcgttatgcccagtcgttcggttattacccgagggcaagttgcgataagcccctggactccacggatcgggctgattaaccaccatcagcgttgggaaattttgccaaatcacccgggtctgattttcaggacaagagctgatgaaaggtgccagcagtgtccaagcccaagactgcggtatgccaacttcaaaccattcaaccatcgggaagagaccctcgaactggcggaagatcaattgctgccgtgcttccgtagtgatggactgagtcaagagagtggccgcctcgcgcgagtcaagatgagccaagaacccatatacgccagcttccccccagcgagtgagtttctgacagaagtcgataaactccttgacgttggtgtacgggtagatatagttgcactgcttcggggcatgagctccgaggatattgctgagcatagtggcatggcctatctcttgctgcgccatgaatgcgatcacctcgcggtccgcagcggtcaaaccggcggctcggaaggctgcctcgtcgaaacgcctgagtccctcttggaagagatcgagctcaatccattcctggtatagagccagagcctggttattgcaggttagctcctggaccagaacattgcttcgctcaatttcgtgcggatacataccaaagactcgtagtcgaaatcgcttttcgcgttgtagacgggcgtgcttccgttggtcccgacaccaccagccgggacatatggagcaggctcggcatggtaaagatttccatcactgggatatgatgtcgccccgggtgcaaccccaccgcgagagatgcttgttccgattgaagaagccgtcagtgcagatgtggtcgtcggtgttccagtaaacggtgtatacagcatggagctattgtaacttagaagtggcggcgctgaagccgatgcatttgcagtcggcaatggcgagtcagcggttgtagttccgccattttggtgtttctttggagaagcagccgtgaaaggcagtgagctcaataggctcaacagaatgatactgttccagatcatctctggtgaaggtcaaagtcgcttgaatccaagacagaaaaagaagctcctttatccctggtattaaagcattgggtcagttgtaattgttggaaagccggataggtacggaccttgcgtagagtacatatagtgctattttagccaatatcatcgccagccaaggcaatccaaagtcagggtcgttagaaaatcacacaatggtgaagacaccatcttcagagctaaatgtgggtagctttgaacggggatgaattccgaatggtgtttatcctcgtcagagcggacgttcttcgtatacttggctagtttagtagttgcaagatactgcaatccccacttagagaacaatccccgggatgctcggcaacagacgacatcggcgcactgccaacattccatggacctgaacagactaacgtacaattcgagataactgtgggggtggaaatcgaatccgaccggacaatgccggatagcgtttgagggaacaaggggaaaaggctatacggttcttagttaaaccatcagcaaaataaatatgtaacaatgagagtggtagaaatagaattgctctgtcgctggaatccatggagaggcagtctttcctatatagatagcccggaagtcgcagtacacaatgccagagcagtttatcaactcaactctataagtaccagatctcactgtgtccgccagccaccctctcccgaaaagtaaccataagtatcgcaatggggcacattggcagtaattctcacaccattagaccaaacaatctccatagtagagcccataatagtcgcggtaaaaggttcacgactctgcagggactggcggatgctttcgagctccttccaaggaatattgacgactgcaggggcccgttgaaatggaaccgccggttggccgcgagcattcttctcgaatacccatggctcaccgttgatcatgaatacaccagccagagaatcgccgttctggctggttagggatccgatccattgagtcatgactggatagtcagcgggcaactctgcaattttccaggaaaggtacttactggctttggggaatctcgggagctgtgagaagggagaaactaggaagggggttaggaagggggctagggaggatttgcttcttttgtggcacatttacatatctgtccagaagatgcgacgatgaggatttgccgtgtatcccggccggacatgcagagtttaccgctatatccatggtgtcatatctaaccataccatgaatggatgttccaattcaccgctcgttcttgttatgctgtagtgcttatgcggcttcttgaatctttgccgtatatgataggagcattgccgaaaagtggcttaagtttaaaagtgaggagtctttagccgagtataagagcaaatcatatcgagctatgattaaactctagaagtacgaagcacccgaataggaagtatacagacatatgacctgtcacaggctctagggcgaaagtggatcggcaagcgttcccgcacctaatttcctttctgtggggccttgcaatatatagctgggtgtgttctttgcttagcactctgtaatagccctgataatggtctggtattatcggtctgtagggttacggatattatcatcgggttactgagttaccaaagcgaccctaatcaaatacatcatgcaaatagaaccatattgggcagatgctgcagctactattacatgcaggctagacagctgcatggatcttcctagtcattaagaagctttgaataatttgaccaggctgctaaatgtttgtgtcaagtatgatggagttatgcagcaagtgggccaacatagactagaaatagtggagcgtatagcttgggttcttgtatattgttcccattcggcaatcagcgaggttatccgtgtagatcagaggcgaccttatatcaaattaactaaccgtgttcctgcaccagaaagactttgaaggtgacctataagctgtgagcagtggaccacgagtatcgcatatttgagctagcacctggaatgatcctgactatctgcgtcagaaccgttatccataaagcatcgaaatatcacaattctttggtgtgcatgggaaatctagatgtggatatcctgcatgctcaaaagagaaactatggagctgccctaaacttatgcaatattactaactccaatattcacaagcgttcgataaactcattccaacacacacatttgtaatatgtcgagatgaatggaaagtcggcgttgttgcatgaaatcggcgttcctccgtgatataatttattctcggcagcgtcgccgatccaaagcggggaaagagaaaccccagaatgccgatatcgcggggccttgatttctatagaagacatcctctcttctcttcatccaaaccatcaggttgcccaactaaccaccatggcccatcttcaagcatcgaatctattctcggtcaaggaccgggtggtcgtgatcaccggcggcggaagtggtaagaacctaattatatcacagatacaaacgtgtacatgtaagctaacagaaacacaggcctcggacgtatcatgactaaagccctggacgccaatgaagtctccaagatcttcatcctaggccgacgcgaagacgcgctacaagaaaccgtctcgcaaagcataaacggcaccatcatcccaatccaatgcgacatcacctcgaaagaatcactggaggcagcctacaacgccatcgccgcccaaacaacacacgtcgacctcctaattgccaacagcggcataatgggtcccctcatgaagcccccgcaacccgcagcagacgggaccctcccgccgctgtcgcaagtacgcgatgaactcttcaatatccccatggaggagtttaacaaagtgatgaatgtaaatgttaccgggtcgtactacacggtgctggcgttcttgcctctgctggaggcggccaataagcgccgtcctgcgccgcagaaggatgttcttgctgccccgactgcgcaggttattatcactagctctattgctgggtttattcgcaaggtgccgttcagcttcgcgtataactcttccaaggccgctacgacccatctggtcaagatgctttcgacttcgtttgcttattacggtattcgggttaatggcatctcgccaggtctgtactactcagatatggccaatcatatcttccaggctgcgggtattgagggtcgcgcgatttctgacggctcattcccgagggacatgattcctgccactcgcggtggtagtgaggaggactttgcgggtttgattgtttggctggctagtaactcgggtggttatatcaatggtaatatcttagttactgatggtggtcggatttctgtttgccctgctgtgtactaagtggggttttgttcaggccgagtgcagtttgggtatacagctgtactgagcttcaatgaaaatagagatatgtagagttcttggtttccagatatgaatgtttaaacgctcatgagtaaaggcaaatgaaaacacgaaacgaaaatgaccttcgcaggccaatctcaaggtcatggtttgactatttagtaagtcgccgtcaatcgctggaccagataatcgcctgaagtaatcggcgagtattttttggccacttggatttcctcgccaaaagttcccggcagcgcttcaataagtttatcgttgttaggctggcagaaatacgctatgctgtaccgagcaggatagtccgaagcatcatccccagagccctcgggcacgggtggctgaattactcggtgacgggtactcttgatagtgtcattggaccatcgggcaagcagatccccagcattgacaacaatagcatcagcgatgggagttgcatccacaaaggttcccttggggctgcgcacttgcagaccgccgtgtcgatcctggaaaagcagagtgattgaaccatagtcgctgtgctcgccggcacggacttggttagggttatttttgaagacttctttgctgacagaaggatagtgaagcagacggaggttattgtcaccggcattgacagagtcgtcgaagaagtgctccggcaaattcattcccaatgcaatggcctgcatgatatgtttatgtagggtctttcccatttcaaagaatgactgcatagtttttttgaaatcttttccttcgtcgtcgagatgatcgggccagcgattgggcaggccttcgactccctcacgaccaagttccatagtctccttgatgtccggcgcggacgcacgaagagtgtcgacgccagttgtctcgtcgacggtggttaacttctcccgcccgatagcgacgtaaccacggttcgaccgcggggtcgtccagcccagggaatccttttcactctgggggcgggcgaagaaacgggcagatgacgcaaacaccccggacaccacggatggcggaatgccatgtgccttcagataaaggaagccggatgttttgaaggcttcggttatggagagagcgacggcatgtttatcggatggggtccccgtgaagaatgggccgaagtcgatcagctagagcagatctcattagtcgtggcttggaataaccagagacagagcatactggtatcttcaaatcatccttatctaccgcggcagacgcttgattgtcgggggtgttggaggtcattgcgtacacggcttcggggaatttgtatgaactctgttgctgtaagaaggcaccgagacagtgacagaagcctgtaaagcgagtgcacgaatggaaagaaaagatctcaagaagaggggaaagtcggagaaggggaatatcataggtcggcggcatacatcgacagataagcgtggatggctgggcagataagccagaagataagcgtttatattcgatttgttggagatttgactgtttgtatcgtcgaaggaatgttatcaggccatttggtttgattgctgtacatttgatcgtgaactgacagcgcagatcaagcccacatcccccactcctccccagtgacccctaccgacatagatcttcgcatctcaaagctgaaaagagggcgcatcaaagaactaaatacgctgctgacatacagtgatgaatggcgacaagactcccccgaggaacaaacggtgcgattccacatcttttaccacaacagtcgaactaggaagccatgtggcatctctgtcctccacgagcttcgtgactatacaatcctttccgctatgagttctcaactgagcggctattccattgaccgcaagaacggtaacaggagcaacaaacccgtatgggtcctctgtagacttcataaacgcaatggaatcaggaaatccggcagccaggaggttcccatctgcatcgagggacagattatcgatcgggtatcccgtataaatcttgtcaacttgaatcagctgctcgccaaccaatttgtgaacagtgacggctccagtcactgaatgagccacatagtagagcccgttctcctggacgatgccattggcaaaagaaaagcctttgtcggcagcgacatggcactctccggtgtcagatcgacaataggtgaggcttccttcgccaatcaacattcctaacgccgcgaaagtgctgaccttggcgtcgtggtcgttggtaattacgatccccaagccatccttgtcaacggccaagttgttaggcgagatgatcgcgtcactggctatagtcttgacatactcaagtgtctctgaggcatcgttcaaatcgaatatgtcaattgtggaattcgctccaacggcccaagcatcaaggaacttccctgttgtaggttcgattgggggtctatgattgatcaaccagaatcgaagtctgccgtcaacactgcgcacgtcaaatccatgtagatccagattgccgaggtagccactgattttcagctgatggaggccatacagcccgtccgggccgggttggtcaatattcaacactgcgatatgatccgtgcgagatcttgcggagatgttgtattttctgccacccggactccatccctgtctggactgtatatttccgcatgctgcgtacagtttccttccttgatcatctagccacatatcctcacatccttctaagagagggtgctggaggcgagtgcaggtccatgggaattcttcaattggttggatctctcggccgatgccgattgtgagaaagataatgttgtgcaaataggctttgtaaaaaattcccagggcgagcacaatcacggcccatctcacagctcgaagtctgataattcgagccattgtgaaggttgggataaatgatgggccgatgccttgatgcctgatttggacctggttcctggccgcttcctaactaactatagttaactagtgaccgctcttcatttgttactctgccggtcttcattcaggcatccaggccaaacacaggcaccaaggcatcattatttactccaaatgaaggtttgaccccgccaaggttccaaggttaggcggggctagtcaaccttactaatccttggtgccgatgtataactacggaggattaaccctttttattggttccaagacgaataaaatgagcatgaggtagttatgcgttgaacatgctcatgctttatgtcttggatctgcttgtcctccgtactctgcatatcaccaaggcctcggccctccacctcgaaggttccaaatgtccacttgcacattaataagctgattgggaatcactccacggacctcggtagtagctaaaaccccaaggcttccttcatcacctccatttccaatatacactatctctccctttttcattcaaatacctctctcgccaaaatgacacacactgtccttgttatgtacccgaacgaagtcgacgtccactttgacgagacctactacatgaaaacccacgtgccactcatcgaaaacatctggaagagccacggcctgatcagctggcatgtcaccaagttcaccaccgcgcttgatggttcgcgacctcagtatctggtgatcaccactctccagtgggagagcgaggagtccgtgaaagctgctctgcagaaccctgccagtgcgggggtgtttgccgatgtgcccaacttcaccaacgtgaagcctatcactctggctggttccgagctctagtgttcatgagtgtatgtcaaattgcatgttgatgattgcttcagcgctgaaattgatagttgccaatgaatgaaatgggaatggattataaccgagtcttgaaggccttggcatttttaatgataagctgtatatctcctctatcaagcgatagcacattcaaattgcattcctcttctgtacgtaacatcaaaagaccacagaccagacttatcggagataaagggattgtaacatctccgcgcttcagaggggcgtccccgctcaacagctcttatctattcctcccctcacttggatatccgaacttggatacccctgcctctctcttcttcttctcttttctcgattctatctgtattcccaaatatgtcgcgccctctagtagtcgatgtccacacccatgtgtaccctccatcgtacatggcgatgctacgcgctcgcaagacagtcccctacatccacgacccagcgagcggagaaccgcgcctgataattctgtcatcagacgatgacccatccattccaatcgacgagcgcggccgtcccgtcgacacatcctactccgacatcaatgtcaagctaaccttcatgcaacaacatggcattgactgcagcgtgatctctctcgcaaatccctggctagacttcctcgatcccgccgaagcccaacaatgggccgagcgcatcaacaacgatctagaggaaacctgtgcccagaacaataagtccactgacccggacaacaccctccctctgcaggggaggtcaactttgtttgcatttgcgactttgccgctgagcgcacccagtgcggatatcatcgttaacgaaatcaagagacttaagaccctgcctcacatacgcggcgtgattatggggacctccgggctgggaaatggtctcgatgatgaagcgctgggtccggtttgggctgctctggaggaaacgcagttccttctcttcttgcatcctcattacggtctccctgatgaggcctttggtggtcccgaggtaacaaagcgctacggccatgtcctccccctggcgctgggattcccgcttgagaccaccattgcggttacccgcatgctgctgtcccgtgtctttgacaaattcccgcggctgcaaatcctgctggcgcattcgggtggtacgttgccgtttttggcggggcgcatcgagagctgtattatgcatgaacggaagtttgtggagaatggtggcgatgtccctggtccgcaaaggagtatttgggaggtcttgaagacaaatatcttccttgatgctgtcgtctatgggactgctgggctcaaggctgctgttgctgccgggggaggtactgatcgtcttatgtttggtatgttctcatatatatttttggtaggtggactcaagctaatataacataggtaccgatcatccgttcttcccgcctctaaatgagggcgagaaggaatggatcagtgtgacaacaaattataaagctattgatgcgactttcgagggggaaaaagaggctgtggctgctgttttgggtggcaatgcggttcgtgttttgaaacttgaataagcacatatactatctagcataaatatcgctatacggtctgtagatataataccaatagcaatgaggtataaaggagcacagtgaacaaacataagacaaatgtagtcatgatctcaggctttaggttggagcaaccacggtcctcaacacatcccaaccaacaagccgccacagctcctgtgtaagccaatccgaaaactctctctgatccatctgtttattctcaagtacctgaggaggcggagtatgcggacgccgcaggccctcccgaaacagatgatcatcaggtccgaatacagcccggaggagagacttttgcagacgatctttggctattgtgacaaattgccgagcagcagatgcctcgaggggtgattgacgggactcggcattaagcattctatccagaagccgaatcagatacttggcttccagttgtgcctcgttcggcccaagacactcgtcagtcattgcctccagtccgtttgggaacgtcatcccggggcagatgcccattggcaatcgcaggtcatggaacacgtgaagagctagcattttgcccattcgatcaatgacaaggaagagaaacccttccattacttcctggtcttcggtgcgcgtgagattgagggagagggccatcgtgcagagcaggtctgcaaggcgaaaggttatttcattcttggtagctaagctgttcgcttttggacgtttgctttgttcttcgggttgcgtggtaggctttgggtctccactcgattttgtgtttttggtgactggcttttgcttggatattgaagtacaatgcaaagtgagtgctgtcatggttgattcgaacagacctactaagtagtaaatgacttggccttggtgctgcattctattcttggctccgccaatcttgtgcaatgctttgtgtgtgagatggaaagcaactgtcacaccattcataacatcatgtgtatccggcatgttggcttgccctgtctgagaaggtttctgctctgtcatactgctctccctctggatagtttggatcagtttttgctctgcggatttgcagaggatgactgccttcacggccagagaattagcctcagagctgctagttgtccttctttgcagggctttttgaacggtatgcagatgcctattgagacataagactgtaatgacattagttatcatcatagtcggtcgatgaaaggggaatcaaataccatcctcttctcctgaatcatcatcatccatcaatggtatgcttttctgcatattttttggtagctttatgcgtttcttggccatgtttgaactattcgtattcttgccaacagcagacgccttgcgtttgtttgccggcaagctctcattgtcatttgcagtgccattgacacgcagtttgacaagaaggccttcaatacgctggttaagctcatggacttgatcttgtagcttgctctgtcctgcctcggaccgttcgtatgcctgttgccagaaagagacgctatcgaagaacttgtctgttgcaacaatttggcccaagtccttggtctttttaatgaagtgccgaatctgcaaaatgtattctaaaatgtatagtcaataatcgaatggtctgagtctgtaaaggttggatcttcgcctaacctttcacgctttgccctggtggttttcccttgacaacagccaatgccagggctaattgaagctgagttggaggtgtaacactaagtttagatgttgatatggttgtcatcttgtcaattggctcgaatagatcatggctcgtggtaaaagagctaccacctacaggttgagagtagaaactcaagatgcacacgtgcccaggcattatatatctctacctcgatcgtacaattttagtcgtaataaaaaccagactcaatttttgaaaaatttaaggccaaagcctgacgaaattccgaattctgaatgctttgtttcaattcagcagcttaaataacagatttgctgattatttcccaattaggatctcatagtatactggttggcggcctgaggcgaaacgcatccaccgcccaagctctgaactcgaacctacaagtttcaatctcaacaacaacctcagttcaagagctctaatctagggttaatttcctctcgggactatcactgtgctctttataaccttacgccctgatagagcaaccacatagccgaaaaccgccacatcaaactctccacttcatctccgcaaacttccaaggcgacaccagtcgcataaaccaccaagatgccaaacgacgatctcaaggcgcacgccgcctcgaaccaagatttctacgccctgctagacatccaaccagcagccactgaaaccgaaatccgccgcgcatatcgccgcaccgcactaaagtaccacccggacaaaatcaaaaaccccaccgcagcagacatcgacaaattccattttctccagattgcctacgatgtcctctccgacacatcagtgcggcagctctacgacaatgcgcgggaagcgcgggtgcgtaaacagcgcgagcgggacatgatgggagcggcgaaacgaaagatgcgcgaagacctagaagcgcgggagagggcaggcgccgccgaaataggcagcgccggtgtcaagcaaggtgtcaagagatcatgggggacggacggggacgaggatgcggaagagaagctgcagcgggagattgacaggattgcggaggatgggcggcggaggcgacgcgaggctgaggagaaggctaagaaggagcttgaggatgaacggaagaagattcaacagcaggaagaggaggctcgcaaagcggcggatcggagtagccagcgcgtggatcgctcgaaggagggtggtggcgcgcaagtccctgagctcgagcgtgcggtgaaagtgcgctgggtgcgggagggtcgtgggttggagcttgatattgaacagcttgcggtgctgttcaagccgttcggaacgatcgagaatacccttgcgcttaaagataaacgccaacggattggagacaacaaggagaagaagactgttgcaacgggcgtggtggttttcacgtctattgtgagcgcccataccgccgttctcgatagcgagaaaaagcttcgtcaacatgctggtcaagatggcgaatggggccttatcgagtctgtcttctgggcctccggcaaccaacctgatctaggtcctggtatatcacccaagcccgaccaagctgtgcctgcacctccaccaccagggccctctgtcgacacttccagcaagcctactaaatcatcattcaacttccagggcttgaaaacagctcccccacctgacaaagcgccctcgtttggttcattcgcttctgcagctgctgcggcagctgccccgagtgcaacgtcattcaacccatccactcaggctccagccgcgccaagtctgcaggaggtgatgatgatgcggctgaagagtgcacagcgtgagaaggagcgcaaagccctcgaagaagagatgctacgagaagacgaggccgcagacgcagcggcagcagcggcagcgaagggcacctagctctcccatggaggctagcttcatttctgcatatttgaaaaggttgatcctaattctaccattgtatttagattcaaaagataccccagagcacgttgtatttgcaacgttgagttgaatagagatacaaaagctatttacatgtgacattttgtgctgtgttatattatacatgtgtagtgagtatacacttagaaacctcagtctcggtgcgattcggcttcctcttcctcttcctctaattgctcctcttctgcttcacgatcacggggagcgggtttctcctctttgccacccgagatgaactctctaagccaaggcggaacgaaagctcgtactccgacctcattaggctgttcgacttccggagcccaggatagcttgaagtggtgttcatgaggacgagcaggagcctcacccatgagcgcaacatcggtcataacttcaagacggcacagcgcaagtccaatattgccaacgccatgaaggaacgttcccgcactgcggcctcggcgggtagtggcaccagccttaataatatctgcttcaccagaaggtaaagccaattggaaagatggatcatatgtgagagtatccggggcactttgcccatcctgacccaaatcataaagctgaactggcaaaagacgcttccgcgtaacgccacggtggtgggtgcgaatcgtcaattcctggccgacataacagcccttgcggaaatcaataccgccagccatatccatattgcactgcaaaggcaaagccgatccactaataacctccgcctggccctccgcaacgccgtgtagaaagcgacggacggtgtatgagtccagcgacacctcggacccgacgacctgagcctcatccgggaagtgagtgcgcagactgtccgagccaggcgtaataatgcgggatccgaagcccggagcacgcgtgtcaatgcaaccggcaatttcggaggtaggtgagaatggtgacggcgattctgactctagactgtatgaagcccaccgttgcggctcggcgtggttcttccaggaggaccatattgtgcgctcgccttcctctagagcgcggagcttgagcttcgcgcgcagcttgtgtttcttgaggtgcttcagcaggacggggacctggtttttgtctacctccactagccagcctgactcggcaccctgggcctctgcgccggggagcgggtaaatgaaggcatcgttcagaactcggccttgcgaattgaggaatgcggtgtatgcgcctgtgcgtcgaatatttcgtttcggatcgttggggactagcatattctgggtcatcagaccctggaggaaggttgtgctgtcgatgccggtgatggagatcagtccgcggtttgtgagtcggctgtaccctgctgtcggcgggaggggcgcattttgactctgttcggtacgctgtgctgtggtagagaatagcctgaggcggaccaggcagcggccacagaccgaggggcgcgggcgcatcatggctgagttggtgtagcggagccaatgtgagttaatctatttctttacaaagctcgatgacgttgggcggtgaaccgtggcagtaagaaaggttattactccttccgccctgaataattccaaagtctagaagctacaattattctgaaggtgtaaaaaactaattaattccaatactacactatttctatgtatgtcacatgtgcctatctaggggctactgcaaagccacctaggtaagcttgtaaccggccgaccacggagctacttattgcccttagccactccctccaagaacccaagcaagaacgccttgttgctcggagaagaaacctgctgactattggtgtgtgcgccagcatcagatggcgtaccatgccgagaaatagaatcaccgctgctcggacgattgcgggacgaaattgggctgacaaaacccgagaatgctgccggctgctggttgacagctcgggagtcgaacgcggtcgtagaaacaggcgacggagagacaggcgctttactaaagagagacaaaagtgaagctttctgctcagcagtttgactcggtcgacggtcaaagttgctctgtgcggctaggccctgggtatcgatcccaacgcctggcaaactcaatttgcgttcaatagcttctgtctgaggagctgtggccattaatgcttcatatccgggtttttctgaccgacgcagaatctgcggctggaaattcctgataggttcaggcgcctcgggtattttcgcaggcagaacctgggttgcttgtgcaacgggtctcgacgaggatacctcccgtttggcagaatggggtcgcgatagaatggtaatcggtgaggatagctgctggagctggggttgctctcgccggttcacgtggttctttcggtttgttccagtgtttgacttaggtggttggccatatgtctcaaattgtggcacgttcaacggtccagacacggtagccgatatctgacctgctcccggaaggcttctcgttgcggcaatctggtgcgtgggttggtgatcgcgaggacgctgaagaatctgcttctctgaaggtgccgcagagggtacaacgggattgcctaacaattccgctggttcagaaacacgagcagtttgcgcacccttgagcaaacccaaaagactatcctggtgctgagacgtcttacgtgtgtgagaagagccctgcatgggagccgccaaattcgctggacccgggcccttgggggtcttaaccttgaaggcttccaagagcgccagggaatggcttgtgagcttcggtggaggcaatttgctcgccggtgggacgactgggccccgggtttgagataactgagcggattcagaaaactcagggtctcctgtccgttgaaacggtgcgggcatatggctcgggttcagaacgccaggggccataggaggctgattatggtgctgatattgagacatagtggtggtttgggggaattgtggtatcgcgttaggtttaggataccaattaggcgcactggtcgggaatgcatcgccgggaagagcttgtgggccattcaagaagtgctggatatgaggttgggatgggacggtgtggaatggtgtggagttctgccgcatgaaaggagacggacccatgttctgctgctgctgagggaagccggggaagaaattaggacccaaatgaggccgttgttctgcagattggacgttggactgagatgcattaggtggcgccatagcattaccaagagaatcccgaggggatgtctcttgacgcccacgctgcaacaaagcaaggagcccactcgccttggatgggtcaacgacagaagcccgagctggctcggagcctggtgtattaacttgcgccggtgcggcgcagatgttcaaaaggcgtttgaggtgatccgaagcatcttgcgctgaggtcacctcaggaagatcacttggaatggccatttttgcgagggacatccctggagtgccattgttagggccattctcatccatagaaagatatccctcagcctgtgcaacttggtttgctctcgcatcaagcttcttctgctgcgctatccactttttcagtgggctgagaaacggggcaaccatgtagaacttgttcgcatttgcgactgcaagtccttcatcgtgctgtttatttttcttcagcgttggcagctctgaaagcttgtaccactcaatcttgctgatttcctttcgggtacgcggttcaaagtaagtatcacggagcacacctcgaaagacgtagagtcgcatatgctgctctctcatcgtaatctcaatgtatttaacgtcgtcgtcgtttttaaccaagttggcctcccgaacatcgaacccagtctcttcatagacctcacgaatagcacaatcaagatccttttcgcccttgttgattttaccacggggaaaactccagttggcgcccttcttccagcccttaaccaaaacaacctcgtccatatcttggttcaacatgattgcaccgcggaccggcacgcgcgtcttgtaatcaaggaattcttggaaggcagccaaatgatggtaatgagaccatgacgacataagcgggcaatgttggaaaatgcgcatagcaaatgtcttcaagttcattgacggtagcgcggggtcaagcggacgaatgaagtcttcgtagaaccattgtgcttcttcaacttgaaaacatatccgttcaaccgactcaagctcctcgcgcggaagattgataatgaaacggacgcacaaatcatccagccctgtcagcaacggcccaccggcctcagtcagcagcccgtcgtcattccgatcgatcaaccaggcactcacaatcttctaaccgcatatttgtttcgatcatatcggtaggtagactctggcatttcaaacccttggtggctgagaaataactgctcactcaatccgacagcgcaaacggtcgaaataagcaagcaacagggtggagggaacagcttccagggagggtgggccaacccagggctgtgtggatatggtgaatggaatatggcggagaataatctcagcaggaagtacagtatgcgaaagcagtcgaggttccaatcaagtcagagaaaagagttgaggtgttgggaagcagagcaatgatcggagctgcccaagatggtgatcgggtgactaaggtaatgtgtggcggtgatgaaccaaaataatgtgccacatatgaatgtggctgtgctgtgggttccaagattctcgggttatgacgtgttgtcgcgctacctgactgttgatctcctggtgttttttgggaattgctatattaatcctcctcgtttcatagtcaagcaccttcctcaaaaatccttacgcgccctttatcttcgctgaatataggtgaaacgagcgcctaccgaaacacctatctatccaaccaggaagcgtttggggcctgaaaggatcaaaggctatatgtgcattgtttattttagttgcccttgctcaacattcgtctatttcttcagcccttctcccgtgaagatttcaatttctgcaactacttttatctcacggttgatctaaaacaaagatgtcgaaaattctagtgtctctgattagcaaaaaggtgctaggtgaaaccgccaataatcatttcggtactgaggtgagtccacttgaccgaccgacattcatttggttttgcgaagggaggtcaggctaacccaatattttctatctgcccaggacccctacttcgaagaagttcctgcttcacgccttggtcgtacatttggaaaaagactcaaaagcgtcgcaaggccatcccgccggggctctctgagcatgatgccaaggtcctgaccaaggtcaaacgcagagcttaccagctggactatgctcttttcagcttgtgcggaatccgcttcggctggggaagtgtgattggactaattccattgtgagtttcaccaggatctatcacactagcaccgggaggagaccaattctaacaaatgaacaacagcattggcgatattggcgacgctgcgctcgcgatgatggttgtgaaatcttgcgaaggaattgaaggtggacttcctgctgctttgcgcatgaagatgttgatcaatgtgattctcgacttcgtccttggcctcgtccccttcattggtgatcttgccgatgcagtgtacaaagcgaatacccgaaatgcagtcattctcgaaactcatctgcgccaaaagggtgccaaggcggcctcgcggcagggcgaaagaaggcaggaccgagtagtggaagtcgacaatagtcttcccgatacatttgacagacaagaagatggagtcgtgggtggccgtccaccggcctatgacgatgtgcgaccttcaggtcatgggggaaggggtaacgatgccccccagccggccaaacagtcccggaacaagtcatttggcagatggttcggcggtgcggatcatccagaacatgatttggagcgaggtggagcaaggtaatgcatggtgcatgaatatattgaaatcgtaattccagataccccaagattgtttgtcgattattttaggtaatgcgggatgttcgccgttagttagttcatttaattttgtcacgaatcaagaatgtttgtcttcagcaaagctcccctggtcgagacctcatacatccgtagcagaattgagagctgtggttatcctctgcctgattcgcaacagtaactccggaattaccctgaacatttcccactaggctagcacaaagagcacacgttggtgcattatcagacgtggaggggttcagcttgtttgcagttctggccacattcgccatgacacctggatactttgcaccttggttctggacatatcgcagcatcaactcgtcaatagagaggttcttggtaaggacattttcggagggcggttgatcaggtatgacgatatcagagagctcggcacagacgctcgcatattgaagtaactcagccttatacagatcacggagcgggtactcgaaccgcacgccccaaggagacatgccgtcagatacctgccaggtgagggaagccccacgtcccttggcgacacccgcaagtgctttcgcagccagacggctgtccgagtcaccccaaatcacagattcacagccagactttttcgcaaattcaacgatcaatctggtcagcaagacggtgtcaacgtcggccctagaagtaggggtggaaatggatgcacggaaggcagctaagcggtcttcattcgaccgagtgctgtcatctgtgaattttgatcccgcatattcctgcatgatatcttccacttccgggacatagtcgaagatgctatgaaaaggtatccgactgatagtgtgcatcgggaaattcttttcaagagcttcgtagttcttatcgaatggaacgcctgtagccgcaacagttgaaggttcgatgatcaggatcttgaagtcgtatcccagcgggcgtccattgtccaggcgatgttgtcgatcggtattcaatatatgcaacaagaccgaggaggaaacaccaaaagacacaggcagaagcaactgggttttagggccatccaagccaaaagctctatagacactcaagcgcgactgaactttgtgtgctatgaagcgcctaaagcaggagctagagaaaaaaattaagtcagaaactatgagctggaggggttgtagattgtcgacttgtcgcatacctgcaaagctgcctcttccgggcaatgaggtcgaattctgcatccttgcattccatgcatgacttgctcagttcctttgctggcataatgactgctctagagtatggggctattcaacctggactctgcactcgatattgaaaaaaagtcgaccaaagctggaaactaaaaaatggtggcggtgcccgcttagataatggccacgcgcggcttccccggtttagggccatcgggttaaagaagaacaccttagccttacaaccctttttctaaacacgccttaccatattcggctctctttattcttgctcatattcctttatttgatgctgtgtggtcttaaaggcctcatcctgaatctcggagcatagtctcgcttcaactctacggtcgccatgaagggctggctccagacattgggcttgacggccctattggcaagctatgcgcttgctaatgacgctgaactagtatgtccctgcactccactatgggaaattgtcagggtctaacgttgttctgcagaaatccgatgatgcgcaccgacaacgatgctcagggatgtacagtcgcaaggcttggggaggagatgttgatcccttcattttggtgaaatttaccaagtcggaagctcaggaaagtgatcctttggctagtttggtaatcttcgaatggtccgatgagggattgattggccaataccggtccggcgatgctgaggtatgtctgtcaacttcatggggacaaccgacgcggctaattattggatttaggtcaaggaaacaatttgcgatgcctccaatgttgaggcaaaaatatgcactcaagaacagctcggctcttttgttctcaccagcaatgccactgacgtctccaaaagcccaatcatatcgaaagcaatccacctcaacaaccccgacgccgtgaaataccctgtcagaaagactggattctactgcgttagcacgtatgcatactccgggcaggactacaaagcagtggttaccttccgaaactcatacggcgaacttcccgctgcacaaatcgcaaagcttccattttatggagccttgacgatcgtgtacgctgttattggagcgtatgtaacttgcaaaatcgacggactcgataggttttgaactaaatgcttacgcgtaactttagattttgggccttcctttacgtgcagaaccgttatgacatttgtatgttgggttcccttctaccatccgagccatgctaatactggatagtgcccgtccaaaactatatcaccgcaattgtggtgttcctgatcgtcgagcagctgatgacgtggggattctatggtaagagacaacaattgattccttgcttgacttcttctgatttttctagaataccaaaaccgccatggtctgaatggcggcgcaaaggcccttatggtcattgtagcagtgctcaatgcgggcagaaatgctttctctttcttcctcctcctaattgtctgcatgggctacggcgtggtcaagcattcattgggccgtaccatgatctatgttcgcattttggccattggtcactttgtgttcgcggtcgtctactcggttgccagtctttcgatcacccctgatagcgccggtcctctagtgcttctgattgttctgccccttgccggaaccttgacagctttctacgtgtggaccttgaattccctgaacgcaacgatgaaggatcttattgacagaaagcaaaagacaaaggcgatgatgtacaagaagctgtggtggtgcatcctcggcagcatcattgtgatctttggtttcttcttcatcaactcattcgctttcgctggacgcagtgacgccagctttgtgcccgaacactggaaggcgagatggttcgttcttgatggctggttaaacctggtttacttgttcgatatcgcatttgtggcttatctgtggcgaccaactgtcaacaaccgccgcttcgccatgagtgatgaggtatggagctcttccctacatatacaagagcagaatcgagatgctaacatcccttacagcttgctcaagatgacgatggattcgagattcgatcattcggcagtggtttggatgaagaagatgcctatgatgctcccccggattatcctggcagctcagccgccgagggccgtgatctctccccagttcctcccaagcccttttcctccgcaccccgccatcgcgagtcgctcgacgaagagacaatattcgcagtcggcgaagaggatgctgagaggtggtctgatgatgaagagtctcctcgcaattcaagcgagagacagagactcaccggcaaggacaaggattaaactgaacattgactcgtctttttttttaatacggtcgttttccctggttagtgtaaaagccgatcaggaccagatatctggtagattgatggggttgtcatttcacttaatgtacaacctgcctccagggcaaggatgcaagcatatcatggcgttggtctttgcttcacacttatgtcaaatacttagttctcctagctctctttttatttatattattggcttatatcgtgttgcttggccacgttcttggatcaagttaataaaatagcgcaggttacatctttgtggctatacggtatgaatttatccgaatccgaattcaaaacacagcccactatcactgtctagtatcattctcatttcttttgcaactccaaacatccgactatggatttcgatcatattgctgagaataagaatgaacagaaggctactatttggttgaaactttggtcaagccgaagcccagaaatcttgtctatacagcttgctaagaagcatcgcctagtaaacctgcatctgcacacaatccacgtcgctttcatgaagctgcagtaccctgatttagcttaagggcaacctgacctagtcaaatagtggatttacctcgaggacataccttccaacagttcggagtcttcatagtaataaccgcagcacaatgtcaaatcgatttaccaataacccgatgtatttggccaaggatgatatccgagacgttatattgagaaccctttgaaggggctttcttgtctttttaggtttttttatagctagaaccttctataactaaggttcgaacctggaggccctggatttgagtcatccggagagcctcaagtggacctcgggagccccagtctctctcgtctttcaagatataaattgatcatttcagtataccatatttccaagctgaacaggactttgaaatgttttgactacataagaaccgataaaagcagtcttatcgcacttgccccacgaaccatcaaaacaacagctccgactctcagacaacacacacaacaacattagcagacgcctcacctgcatatgcaaggcaatatcaccatcttcaaacatcacatgcctgtagccagtgcctaagcacacacaatggcatccgagacgcatccccacgtccccgcaaacccatcctccatttccgacaaagaaagcgacaacgacaacgcaagcacagccaccgcaaagccagaaccccaaacaacagaacccagctccagggctagcacgaccctctcagcccagctgaatcaagaatgtaacgacctactctcccagatcgacacctaccaatccctccttgcgaccacgctacggaacccacagcttgtcgaggtgcgccaattccgctccagcgtagcctccgagctgaggatgctggagaagctaggacggcagatcgagggggcgattggagggacaaccgcgggaccggaaacaagtcgaatggaagatggggtgacggggtcgcgtgatcctgatttggaaatgcggcttgtgcatgcgcttcgctcgtccaatttgccgttctaccaggctgtctggaggatcgcgagcgggtcttgttctgggttggttgcgctgggtaaaaggttttactgggatggggagacgaaggcgacagagaggaagagtgctagagggaaggggaaggggaagggtgagggtgctgcgcagccagagaagcagcctaacaaagataagcgcaagagtgtgtttgtggatattgtggctgacgatggagaggagtgggtcaaggtgtctactgtctcggagagccggcttttgttcgagatggcaaagaagggctgggagggtgatagtgatgatgatgagtggtctgacggaggtaaaagacggactattttgcagaattttgatgaagatgggaatgaggatgacgatgatgagttagagctcattaaactcgcccgggatctaaagaaggcgtctgacgctacgcgcgttaaatataaacatcctcggctacgggttgttatacctaagattgaagagggaagtgttcctgagattgatgctgtcttgaacgagatgcggagctatggtattcgggttgactgccaggggaatctgccagcagagactcgcaccgggctagaccatctgctgcctcaaccgttcaaaaacttcacttcgactctgaatgtcgactgcactttactccttgccttggtgtctgacttgtctcatatcaaggacatcccgccaccaccctatgtccatagagccatcgttcgacaaatcgaagttgagcgggaaaaaccactgctcacttctgagctttggccggctatggatggtcgcgagctcgtatccacgacagaggctgcagtgcgcttccgggaaattgtcggaatcattgggacagagacggaaaagagccggactcgcatgttgctgggagatccaccatacgaacaactcgatcgtgaggctgttctccagaagtttcaagaattgtctgattatcaggtgcccacaaattggaaaatacccatcaaagtggttgcagcccagccagtcattgacgcggccaagacacaaggtcacctttatccagtggtacatgaagttggacaaggcctatcggacatcaatcagagcgtgtttttgtacggttgggtcaccggtttgacaaccatttccagcaatcgcacaattgacaaacaaatcgaggccaccgttgaggacaacaggaaaggcgatgatgacctaagaggccctgacgtttggatctgtgacacggcacgaagtttggtgggcaaggacaaagatcgaaaagtataagcatagaggttcggtcatctgctagacggttgggatagaaggcgcttttcttgacgttgacaatttctgaacatggtgccattgttctgctgggcatccaatcatgcagtatgttttatacaacgattggctgagagtttgagagaaaatcggagaacttggtcctttccatcgcgctatcagattttatttacttctctgaagatttgccgtggtcgtcagggacatagaagatgatttccttgtcggcactggcgatcatattgtaacgcgggttgtattccaccatggccgcgcgatttggagcagacaacctggccgagggctgcagtgtgatgtccccccgggcgatctgtcccaagtcccacacgagcataccgtgttgatcaccattgcctccaataacgtatcgaccatcgggagtgaaacaggcgtcgccttgtccgagcggcttgccggtcgtagacaccggtgcagcacgaccagatgatccaatcttgccttctaggaaagccttgagtgtaccatcaaaggcatctagaataaagtgaccatggtagtccgttccaagcatcaaatattttccatcattggaaaactccaatcgagtccatgctcgtcctcgcgttgacggtgtgaatctctcctcgtattgtgcaaggtcgaaggtggagaagggcgacttgtcaaagttgcggaagtcgtaaagaaggattgaagctgtggattgagaggcgattgcaatgactgtacccgaagggtcaaaggcagcaaggtatggtgtcgcaaggttgagctttccctgcgggttcctggaattcaggtcccacaatgtcacagtatcgtccttggagcacgacatgaaggcgtcgctggccggggattgagccagacaagttacttggtcgttattgccggtgaaatatcgtatgtatccctcgttgtgaagatccagtagccgcaaattatctgtcaatggtgagctgggtagccaaaagcaaaggcattcagtcgcatactatcaatcttggtactcgcgtgaaggacctggcgagagtgatgggtgaatcgcgcaagatgaacaccgtatttcttgctggcaaccgatttattgtatttgccctctttcacgtcataaacatgcatactatcatcgttcccggctccgatcagaacgtcgccctggtcatcaaagtccaaagaggtcacgtatttggacgggtcttttttacaagggtggaacccctacagaataatcatatcagaatggtgccacagtcccaacattcaattggacataccttggatggtctgaaggtgtcaatgatatccgtgattttctgcgacttgaggggagcttgggcggggaccggaccctgctgaggtgttgattggctttcagccatggcggtatggtcggtgaagggtccttaagatatattatatgaaggaattgcagattgcgaataataagagcttgacgggaacgtgaaaaagaggcaaaaaatacatagaactgataagctccaaattgaagctccgcgactgggtatttttgcgcgcctcaccgcctcggctgacataagaattccggggccgacgccggaggccccaggctcaattgaccaatgagcgtttcaccgagtcccagttcgccgcatgtaagcttttatgtccacggttatctcagggcgcgtcttgactcaacttctgcaatatctggccctaggtgaaaatattgtgcattcgttcatattactcacctatacttcaaattgcgacttggctatacagcctcaataaattgcacatatcccgtggaatctccgctactggccgcatttattttgtccaggtccgatattcctccgctaaccgacaaatctgcgcaagtcacatataaggcgctatgtctactactgcggggtatgttatgtctaagtgtgggatatatacaaagcctgcgctaacagcaattgtggttaaacagcgcgttcatcgcaggtggcattgcagcatgcggtgcagtcacggtcacccatagtttcgagacggttaagattcggttggtttcctgatactccggatatgctaccattatactgactataattggttccaagccttcaactgcagggtgaattgcagaacaagaatcaggcagtgaagatgtacaagggccctttacacggcatcaaagtcattttacagaatgaaggacctcggggtctgttccgaggtattggatctgctgtatgtgatgtcctctccaaatggcatataaagacgcattgatctaacattcaggtcatgtagtatatctaccaggtcttgcttaacggctgccgtctgggcttctacgaacctatccgcgcaaacctcacaaatgctatatacaaagatcccaaggtccaatccctcggtgccaatgtcgttgcaggagctgcttcgggtgtcattggtgctgcagcagggtcgcctttcttccttgtgaagacccgtcttcagtcctactcgccgttcctccccgtcggcacccagcacaactataaaaactcctttgatggccttagcaagatctacaagagcgagggtattaggggcatataccgtggtgtcgatgctgctatgatccgcaccagtttcggcagtgccgtgcagctccccacatatttctttgccaagcgccgtttgacccgccacctgggcatgaaggagggtcctgctttgcatctggctagtagtgcagcgtctggatttgttgtgtgctgctgcatgcacccccctggtatgctatcttgaacatggggctatacgttcttcgctgactttcactctagacacgatcatggctcgtatgtacaaccagacaggaaacctctacggtggtgtgtttgattgcttgctcaagactatccgcaccgagggtccacttgccatttacaagggcttcttcgcccatctcgcccgtatccttccccacaccgtaagtgacaggagttgagccttgctttggtattattcatgtactaaccccacttctagatcttgaccctgagtctggctgagcagactaacaagctgatgcgccgtgtcgagaaccggatcctgcccgactctttccgcgagggaatctaagcaccttatgggatatattttgaaggggtcttcttgcgagatccattaccagtgtatgcattgcctggctggggtttcttttcgaatgttctgcaccgcacaattgcttctcaccgggaatatacctggcgttcggtagagtagctgttgatttcaaaattcgcaagtctgtacatattgttcttcgcatattgcaagcattggaaattcctttcgggtatgtaccttcgcattatctgatcccccactgttggtttccccggtacagatcgcgaaacacgagaacgcgctagcacgtggtgatgcaaggcacttccctgctagtattcccactagtccactagtctagaggtatgtggggttgccagtgcatccagagctcaaacctggcaggtggagatatctcaatggcacttgcaagggattactcgccacattgcattcgacccttgggaacagtgtcaataaatataccgtacaatatagacgactgtggtccttgtactccgtactccgtagatattataccaatctgacttgactccgtaaaatggtcaaacaaagacccctaacgttagctgcctaagcatgacgcagctaagatgatcggcactttccttttcggtccactctaagaaacttcctatggggtaaagggtaaacgatccttcattcctgagacttgacaggagcagccacatcttgctcgctttgtttgaaatgctatggactacctaggcacatcatgtatcaagtcgagattaacgcttgagaataacccctggaacatgttaacaggtacagcagatggaacgcgtgtgtggagagttgagcaaacccttacgccatgaaaaataaactaaaaattggcaaatgagatgctaacgccaggatctagaccaataaccaaaccaattagatccgtaaatccggattgttttgctagtcgcgtcgcgtgtttttgtgcccaagtggattgtctggcttatctgatcgtgatcaatagtggggaccgaaaattggagacgcgtgggagttgttgatgtcttatatgtaggtttatgaagctacataagtagtggctggatactgttatatggattggatattcactattatgtatgtatcagattcgagaaggagtgatatacagatgtagataagatcggaatctacaaacctacaaacaaagtactacaaaatctatattcacatgcacaagaatggagctggaatggagctcggccaagctcggccaaggactatcctttcggatgtcgctgggatccaagtggcatgagaaagaaatcgcccaaataggaaagaagggctgggaaaaacacgcgccgtgcattacctaagcggtgcgcgcggtcacgtgcgacgtgacttagcacgtcgcgctaaagagaaatcggcagtacttaatcgagtttctcttccctcgtccaactccaaagttccaatcccactatcaaggcttctgtctcattcttacctgctgcctttgttctcaataattgttcttgtgatatcacatttctcacataattgttccaatggccgctcaagtcactccctcgaaacaggtacgtgatgtcacgtctcttgcctctcgcctctcgcgtccgacgcgtcgtgaagttcgtttgagctaacatttactttttcttaggctgcttcctccctcgagaacctcaagatgagcgattcacctattaagaagctcgacttccagtcgactggcaaagagaacgcgcccgcgtctctgaagcccgtcgatgcccccattgagaagcccaccgagaaggctctcgcgtccaagcctctgaccatcaaggagatggaagcgacagagcccctcctccaggagaacccccaccgtttcgtcatgttccctatcaagtaccacgaggtaagtcacgtcgtcgacgcgtcccacgcgtaaagtggatatcgacaaagatgttctgccactgtgaacattgaagctaaccgtatccctcatttcacagatctggcaaatgtacaagaaggccgaggcttctttctggaccgccgaggagatcgatctttccaaggatcttcacgactggcacaaccgcttgaacgacgatgagcgttacttcgtctcccacgtcctcgccttcttcgccgcctccgacggtattgtcaacgagaaccttgttgagcgcttcagtggagaggttcagatccccgaggcccgttgcttctacggcttccagatcatgatggagaacatccactctgaaacctactctctgctcatcgatacctacatcaaggagcccaagcagcgtacctacctcttcgatgctattgacactagtgagtgattctcccattgacttgatatttgtccaattgtctaacctggcacttagttccctgcattgctaagaaggccaactgggccctccgctggatcaacgaccgtgagtcaaccttcgcttcgcgtctggttgccttcgccgctgtggagggtatcttcttctccggctcattcgcctccatcttctggctgaagaagcgtggcctaatgcctggtctcactttctccaacgagttgatctcccgtgatgagggtctccacactgactttgcttgtctgctgttctcccacatgaaccaccgccccgaccccaaggtggttgaggatatcattgtcgaggctgtcggaatcgagcaggagttcctcactgacgctcttccctgcggcctgcttggcatgaacgccaagctgatgtgcgagtacattgagttcgtcgctgaccgcctgctggtggccctcggcaacaagaagtactacaacgctaccaaccccttcgacttcatggagtccatctccttggccggcaagaccaacttcttcgaaaagcgtgtcggtgactaccagaaggctggtgtcatggccagcaccaagcaggaactcaacgctgagggcgagaaggtctcaaacgacggtggtctcaacttcgatgaggacttctagattaagtccttctcccttccctcttgtgttgttttataccctctcccctttcacgtgatattatgccgttttgtctcttattgattgatgtaattcctgtttgcaggctcgcatgggaatggtgtttcttgtttttatttttcctggtctatcctgggctctggtgcccatggatgaatggtggattctctgtatctagatcttcgaatgactccaatgtgtcttgatatatgtttgtttgtatatgtaacataacatattaatcctcctaaatatacgttatcaattggctagtcccatcccatccctacttcacactctattgaaactctatgtatctcaagacctcctgtggattttgccctaactcgaagttggtatgtcattcccgataccgaaagacctcaatcccatatctatgaatgcatcataaaaagtaataagcgaaaagaagcataacaaacaaagcaatgaatctcattcaaaagaaaccagttgatttaccgcttccccttcccgcccttcttcttccccttcgcactctgtccctgcgcctgcggctgcgccttactggcaaccggcggcgtcgcaacctcctcagcaggagcatcgaccatatccacatccgcgccggcagcaggcaccgcagccgataaccccaagcccgctacatcagcaccggcagccagcttgcccagacttgtaatcagacggccgacttcctgcgccttgtttgtgcggtagtgcaggcagattccggtggttgggttgaatgttttcagcgtgagggttgcgattgaggtttgtgcgggtgtggtggtggaggaagcatcggtggctttggcgttttttcggacttgggatttgtgggcgcggattacgtttcctcgtcggtttgtggggaagttgtattttgttactatccgggtctgggaggtttgcttgttagttaaatttggatttggattggggtttgcggttggtgttcattgttgcccgctgtgggggaacgcggtgtggaagattggatggtgggttgggatagagggttctggtgcttactgtctctgggtacgcttgtaataattgcgcggactgttccaggtaggcctgggaggtggataggtagggcattttggagtagtggtgagcgtccgtagagctcgtggttttggagttgaggtgtggtgggatgcgcagattggtgggtgtttctcttggtgtcgcgggtttactcagaatgagatgtcgcggatcaaaaggaaatgtccgctgagattcaagactcgagagagaaactggttatgaaagttggtggatggagagagcgtggaggtgttatcgttgtgctggcggctttttccatgtcttggcatcaatacgttcactccgcaatttataggaaccactctaaccaactagttaaccaattctcttttattatcctatacgatgtgcattacttgagatctaattaaatacgattattggacctaacgagagccatcaaccacatctacttcattaggctcagccaatttaccgaagatcgcagcttgtatctcataaaccattctgtactaagtagcttaccctcgaatgtaagcgtccaagtgaggtgactaaccgcgacaaaccagagatcatgcaatttctgccaagccttacatagtggaatatgcgaaacatccgtcctgttgtgctagagaatgcctttctcctctattattacatcccctcaacaaggcacggagcaaatcagcttgatacctttcactctacacgatagataatcgactcatgtcacaaaatgcctatgttgagcctgtgttctttgtaggctatagtaagctgcatcgctcgcagcaaggccttaacggcgcactagagtggccgttgttgagggacctcgtgggcaatgtgcaaggataccaagtgctcgaccttggatgtgattttgagtggttttctcggtgggcacaagaaaacggagcttaaaaagtccacgggatcgatatctctcggaacatgcttgagcgggcaaagagtttgactgtacatcccgcagtcacatacagtatcggcgaccttgatacgatcgagttggaaaagaacttatatgacttggtatacagctccctggctttccactatctccagaatctgaaggagctctttggacaggtctacgatggattgaaagccggcgggcatttcgtcttctcggttgaacatcccatcttcacagcccctattattgcaccggcttggactgaaagtgctggtcgaacagcggcatgggctgcagactagtacgctgaagaagggcttcgcaagagggactggcttgggatggaagtcttcaaacaacatcgcacggtggacacacatatatcattacttctgggtactgggttcattttgacagcagtcaaaaagtggatgccgactagcgagtatattaaagaccatcctgagtggaaaagggagcgacaccatccacttttccttgtggttggtgcacgaaagcctaagggagcccaaacttgattcgattccggaccgacggtcaatgtctttatagggcttggttcgcaggctgggaatgcgtgagagaatgcgaggaactcccatgcttggaaaactatacaatatgccatttacacgtctcatcttccattgcatctggtactgtacataccctgctatcaaggcctaaaaactatacacattaaacacatatcgacatcacaaatacgtaaaacaaaagatcaacacacccatcctccaatcctccaatagaatgccaaacaaaacgccaaaacctaccatacatcccagaaaatcatagatcgtacattcgtagatcgtagatcatacatgcatcacatacatcgaaaaacaaagaaaaagaagaaaaagaaaagactcaagaaatgggccgatggcactccgaacaaatcagcttctgtttcccatccctccccttaacactgcggaaacttgtcccacgacagttttcacatttgagcacgtcttcctctccatcacccatcgaagaggaatagttactactcaagatactacctcctgaaatactcagcctgcgctcatgcgacgggattcgattcggactgaggaagtcactcggtttccgggactgcatggccagtgcatcgtgcgtgatcttgttccagtacgcgtagctgcggtcaccctgtatccagagtgggttgtcttgtgaatcagtcgcagctaggtctgccggggcgaatttcaagtggggttggggtggtggttgcggcttggagtttgaggcatttgcatggctgacatcttcgcttgtgcgattgctgtcggggtgtggtcggcctggtgatgggggtggagatgtagtgaagatggacaatgattcgttccggctgaggcttgaaggccggggcgatgctagtctggaaagggatgggcggttctggggggatggggtacgggttcggaagtcggtgcgggagccatctgtgctggagcggccgtggcggacgacggagttgcgccatgagacgatgcgctcggatggagttttgtgggaggattcctttccgattgaggaggcgatgctacggcgtgccgaattggagcgtcttaggatccgtcgtgagatggtggagttggcgttccaattctcgaagcgtcgtttttgatacgcgcagtcttgccggagaactttgatcttgccggagtagtcggcaaccacgattatctctccgtctggatgcttggatcgtgcgaggtacgagggtgaggcgtgggccattttgctgatgatggataggcgaggtgctgattcagagtgtttatgggatttctttgaaaagtctgttgactccggaccaataagggctaccgggggcggattgcagatgtcgtagattgggtcttctgatagcgccaggacctctttcgtttggttgggtgccattattgcagctgttaccatggcagactgtgtctcaaatatctccacagcctgcttttcggaatcctgttgcacaggcccaactggccacacgtatgccctgcgatcctcactcccacatatgatatacttgccatcattggtgaatgaagctctaatttggctgcaggtgttctcgttgccgcggaatttagcctgcaacgatcgatcattgaagtcgtacagcctgatgcgggagtcgttgctagtaaccagtaacttgatatcaccatcgtcatcatccttagggttgtccttgggaaccattatcgtatcgactccagtgattttactacctttggcgttgcgtccacgggccgatcgtacatgaatctgggctgatacctttaggccctcagtgtcatagatgttaagcatgccattcaaacatccggcaatggagtatcggccgtctggagtgaatgccacagcagtaatcatatcaggcacagtagtcacaaaagccacgctcttatcgggtatactccagagtcgcagtttcgtatcgagagatccagcgaggaaaaagcggtcgtcacgcgggtggaattggatcgaagtcacaaagtcactgtgctggaaacagcaaagacattccggtcgagagatatgccacagtcgcactgttttgtccattgacgaggagagaatgaagttattctagcgcacacgtcagcatggacgcttcccatcgtgttgaatgttttgagcatgcatactttactccagctcaggtctaggatacttcccgtgtgtccctcatacacctgggcgggctccggctggaacacaggtgccttcaggccggaatcgtcttgtgcatctacgggtgttgccttttcgtgctcattggcatcctcgcgctcctccggtgtagcgataacagtccatactcggaccttccggtcctggccagcagccgccagatatttaccatctttagagaatacgagtgcccagacggcccttccgatgttgtcgccattctgtagcaaggccgaggacgtagatatccgtctatctgcgggtttgggcgatgggccgctgccctccagttcctgtgctagaaacacgcggtcgaacgtcttctcttttttgtactgggctcgcaccttcagatatttcgacggagcagggtgtcgaggtatgaatccaattggatgatgtgaggtgtccatggacatgcggggcgtttcagattccgaggtctcatcttctacctccaacaactgatcttttttcttgcctccgatgattcggctgaggaaggaaacaccttttctgtagttgagaagagcaaaccacgggtcagtcgctggtaatatcacgtatattgttgcggcgagaatcctggggggaggcgaaaagagactcccggcacacaagtgtcggcgacacaggccgtcgggcgtaacttgtgtttccaaggcatggcaaagtctaaaaactcacttcttctctctaggatgtttcgaggtaggcaatgcatctcctcgtatcgggcttcggtctccctggccgtactcggagcccacagcctctgcttcgtatgacgcttttcccagtaacttcaggggaatggacttttgggtattggtgcgttggataatgtgctataacgagagcacggccctcctgtcagcttggctgcatcttcgtatccgcatctccgatgcgggttgcacaaagcaaacaagcacatgatcggtccggaagtattggccaatttggtgtggcaagtctcctgtgagagcttacctgcgatagcggatctatagcacttgactcggtcctctcgtccggggaattcaaggtcgaatgagagccaccaatgactgcgcgtttggtatttcgaacatcgtgcagactatgagtcgagcccgaggggacatccgatgtggccgaggctggcagttctgtcagcgtctttccataagatttttctgttctttttcgcgcattggagttctccagacagggaccgaatttagagtttggccaagtctggagattcaagattcaactctcgagattcaagtctcaatattcaacttgcaaaatcacacttaccgggaaatgtcgagtttccggggctcaaatcggctatcgcgggggtcgtcgcgactcggagttgtagattgttgcttccctccgccatgtgttcagtcgcatgaggggtatcaggtaatatacaaatgcagatgtatgttcacagagacttgcgattaacaaaagaaagaaagaaaaggaagtaaagcggcaacgaccggatagcgctggatgacatcaaattcggggagatggggtggagacttggaccctccagggtttgcttaattgcttactgagaacgttaaatggagaagatgacagttaagagtatggaatagagaatagagaatagtaattatattaaatgcgcgattgaagctttctcacacggtcctttgcaatatcacacatacccttcaaagtcagtacatacatccagagtaagtaactcgataagaggacattacctgaatggtctcttcaatctctttctccgcattagcccggtcaatgcgctcgcgcatctcgaccataatcacgtcgcgattgcgcccattgacgaacgtgctatacatctcaagtcaacatgtatagatcactgcgcaagaaacatggacctacacaaaccgcaaccctgggaatttctcctcgtattccgcattgagtgctcgtaattgctccgcttgttcctcggcgccttcattcaattgggcctgttcctttttgctcagctcgctcagatgttccggattggctggggctcggccaagacgtggatgcgaccccaaaatgccaaacagtacgtctcggtcggtaggtgaatttgcggctgagagtgccgacatgcgacctcctaccgcatcgatgagggtggtgtatgaagagaaggtctggttggccagcacgggaatcatcagtcggtggagctctggagagggttcgaagagggtatcgagcacccgaagctgggcctcttggggtagggaggggatcgtcgacagcggggggagttcggccatggtggtttctatgaggatatgtatgaatatgaagaagggaatgtattgcgattaagtataaaagagatcgtacccgctttcggaggacgccgaggcggagaacagcgggaatagtcgatgtatgtatcctatagatgtgtacatgtgagctatggagactggaactgtttgtttaaccgtttgactatttatatcttagtgtgtttcatatgttgagtttaacattggacacctcgcattccttgaacacccaatcattccaacaaatccaccgtatacatctacctaatcaacaactgcactctattgaaacctgatacattattaaattacgccaatcaaaggtggagcccaattgagaacatgttccccctgagaccagttcgcctaaaccaactttgtttttatgaaacagccgaatctgcacctccggccttgattgggcacatcgcgatctaaagatccgatcccaaatcaactcttagtgtctttacccgctttctggggccacttttccctcctattctctcctcttcgctttacctttttgcgcctcctctggcccttctccatgcggctcacgctatgtctttgaatgggctcgatagtgcccccgtcgtcgaagcctaccaaagtgccctggctgacgcgggcgggtggtgagtaccccctttcggtgtttcaacgcactgtgcgacagatccattaacttcacttcactgacacccctatgtttcaggtttctattacactatgttgcaagagatgaggttgccctccacgaacgaggcgtcggcggggtgcccgaaatccggaatgccattgacggctacgaggaatgctcgccgctctatggcttcctccaataccggcgcagaaaagtgattatccgatacatgccggagggattatctcggcttatactaggtatgcccttcgctgcctttccataggaattgatctaatctgtcctagctcgaagcaatgtccagttccaattcgtgatcgacaagttcacccccaacgacaccatacttcctctgtccaaagcctccgatctcaccgaaagcgccctgtcctccgcttgtctcctccataccgcgtcgacctcaattacctcttcctcaagctcgcttcgtcgccgccgactgatggaaatcacggaggatgccgaggagaacggcacaaaggatgaagctccgaacccaatcacacatctccagtcggaggcccgacgcagaccaaggagtgtcaagtcggaagctaccttggtgccgtcgccaattgaacatcccgtggaaccggaactacccccgatatcaccagaaagtgaaaaagcaccagtcgatctcataccacccccatcccgatcgagctcccgagccacactctctcgagggagtcccgtcgaaccacaatcagcgacaatgtcccctaggtccataaaatcagatcgctcccgctccagttccaggtaccgaactatcttggatgaattcccccgtccttcggaagaggcccggttgtccagccaatccagccgtccctcactccgagatttggaacgagccgcgggatatacgccaaaggttaagctgggaccccgaccgtccgtggatagcagtggtagaccccgcacagcaggcagttctcgaaatttagaccaacgtcctgttgcatccctcccgacaaatatgcgctcatcttccgtgcgaaagcaaaacaatgacgcgccgcgccctcgatctcaggggagcactttcgcaatcaaacccactagtcgtgttccaccagtcccccctttgctggttccacccccctctatccctatttcgagacctcagctttcccctggcgccaaatccctcggagctctgtcgacctcctcgggattgacccctgagaaagaacgtttgatgaaggctttgcagcaaagaaggaagaatatggccaagcgtgcggaggaaacgaaaaagaagcaggcctctgaggaagggctcaaaccagtgaagcatatcgccaaggatctggatgccgataaagagaatcttattcagattcactatcccgattctgaaatgatgctgtctgagcccgagacaatccaacaggatcaacaggagttaccttcagccaattcacccgtgcctcctgactccgcccctgagcctgcctccgagtctattcttaaacccgcgttcgagcccgttcatgattccactcttgaacttgccaccgaacctgttcctgagagcgttattggatccgctcctgatcctgtcgtcgaggaaattgctgaattcagtcccgacctcgctcctaattcggttggatcaaatttcgaagctgtccgtgaattagtcgccgacccaattgttgagtctgctgtgacgcctgagccagagcagctttctgggcctcttgaggctgaattaaacccgatcggtgatatttcccctgcaagcgctgaggatgggccatccttacctacggcctcaagtaccgacagatttatctcagccgatcgtgctgccacaccttcagagacagttaaggaggaaacaatacagacaacccctgaggatgaaacacgcaccgagcacgaggactccgcaatctctggtctcgccccacctacctttaatcccgacgtcccacttccttcggatgccccacgagattcaggggacgtctccgaaacacatttcgaaatttctccagctgcatatgtaccaactgacgagccttctgacgtgcctatcttagcagaggtccctcaggcggttcccctcccctccgtcccctctattacccctctagagagcgttggcacggaaacaccagtcgcccccgtttttgtctcaatcgaggtggacgaaccgacccctgatcgcctagttgccgagatagccgagcctcttaccctggatcagaggcgtagggtccgcctggagcctattcaagtgcctactctagatttctcggacgacgacaacctcctttccgacgattcgtttatggaggaattgacatccgctactgtccagcaagctagaccggtatctgtgaaatctcccaacggcgtcgatcacgcctggaaaaatttacgcgccgtctctagcccgttctctatgggggcatcgtcgggtatgcaggctctagcagtgggccggtccgtttctagctcccactctgaaagtcgccctactacgccggttctcatggccaagaagatcaacgtctcctctggaatttccagtcgtatcaaagctcttgagaagttttcgagccgcgaaggcactcccttgggtgccagtccggctgtaagtgcgccgtcggcctcgtcgtctttcgagaaccttcggaaacgcgcatctatctcattgcccggtgggaaccacgaattcactccaccaagcacaatgcattctgctcatgtccctgagagcttttcccgtgcgccgagcttaagtcggcacaaccgtcaggtgtctgtggatactgcgcgacctgctagctctatttccgtgacggcccgtatcgtgcgtgatgcagatatctctcccgtgcctgctggacctgagccctcggagaccgatgttgtcaacccccaggctagtcctgtgactgtggagcctgagatagctgaggcaccactccctgagatctcgcctatcgagcctgccagccgtccccaggaccgaagcttgtcaatctcatctactacatctaatcgccaagcgacatctcgccctgaaagccgtcccggaagccgcccctctcccccctcgcgctctaggactgacgacagcgtccaatcagtctcttcgacgcccgaagataagaaaccatctcgcacttcgcgactcatacgccgcatgtcgtcgatcacatccaactctcgccggagcattatcggagcgctcagctcgccagtcaaggaagaggagtatgttcccaccctcacaaatgggtcgagtaaggcttcagagtctactagctcgcgtacctcagatgctattgaaattggcgaggtgaacgtccagttcccagaaactcttctatggaagcgtcgggtcatgcgcatcgatgaagagggatacgttgttctgacacctggcaccaatgatgccaccacccggaacatgactaaacgctaccatctcaccgagttccgcactccttgccttcctgatgaagatatgcaggaactaccaaacagcatcttgcttgatttcttagatggaaatacgcttcagtgtgcttgtgaatccagacagggacaggcttctgctcttcagagtaagtatcccttgcattttcttcgaagttggagaataaatagctaatcatctacagctctcatcgaggcccatagcgcccaccagcaatgatcctcacatttctcaaatgacaggactccttataccgatactcctgtctcccatttccattctcttctgggcgtcgcccacccttcctttggctttaccaactacacgcatctgctaaacctccttcgacatctatttcttatctcttctacaaccccctctgtacctctatagcttttctctgtcttatctctctcaatctggtgtgtatgtgttgtgatatatgtggcgtgttcttggtataccccgagtcaaaagagcttcctttttcctttcccacttctcgcaatgccaatctactgttctttgccatgtacagacagacagacagacagtatttctttgccgctccttttgcttgcctttcttaattgactttgctcttgcatacacactccatgccttcgcatagagtgttggtgttctattcaatgcactgtgttctcttcttctcttggtttacttctagaagctttatattctaatctgtttttgattgctattttcgtgcatgctaattttggaatgtatctaaaaggtttatttgattctcttcggttctgcgcgcgctattcaactaatgttcaaagcttgtgctggctggtagtgatacggtggtgtggttggtttgggagaagacaagtagacttagggagaatatctctcgtgctattaccagctatgtggttctacctacttttgggggggtatcaagtggaagcaatccgaaagaatcgtcagcgaaacatcgaaccgctagggctgtgcacatctagcaaattcatgccgcaacacccttctaacacccaacgcttatatatctccattgctaagctaagaatatagccacgggatatctgtagggaaataaaatcgttagacggtgtatcttgacagccgcgaataagaagtaattcaataacatactagagaggagggtatataattgtggcgctgtgtttttctcatccactgttcctttcaaaatccagcgatatgagattttgattgttcaacttttttttggatttctgataaacgtcatggctcataacgatcgttaatttcatgaagcgatcaggtgtaaccgttcgcaaggtcctcgagctcctgatcttcatcatcctcttcatcttcgtcattctgctcttctaatccctcggtctctggaatggatgtctcttcatccaggggatgttgaccgttttcagtcgtgccattctctttatttatagaatagaactccgggaatgcagtgcgcatttgcagcacatgcgcatcaacgacgtattgcatgaggttgttgacggggaaggaagtatgcatgcgtttctccgactccatcagctcaaccttcatctgcatctcccactcgtgctctccggcatggtccccaataatcttcttccgctcgtttttgtcggtggtcgaaaccaccttctcgcatccgggcatgcggcatgtccaggtatcagatatctcgtcgatgaattcttcaatttcatgtggcgtatctggagtgggattccgctctggagtcagagtttggcgtgatggtgacgaagatacggggggagtctggagtttatcttttttgatattgtccttgaacaggctcttcataagagaggagccggcgccggtcgaggaggctgcaaagaacgagcgagtccgaggctttgtggctgagaatggatctctgattaattcatagccacgcgttttgctcggtgtttcaatttcgtcgatgtcgatttcatcggtatcctcttcgtcttcctcgttggactcgactgtttgctggtttgcgggggcattgcgatttcgcttgccggtcgctttattggagactgtgtggactcttggacgcagcacagacttctgggtccggccgccttgttcatcgtcgctggattcttcctgcgaatccagaggggttaggagtgcagttggcagaggggcggatgtcgtggatgcatgtgtgagttccctatggataacatagcgagaccatctaaagtcctcttcatccatcatttcgagcacggcgcttgccctgaaggcaatgattttctgggcgtcttcgttgctgagagagaatcgttctgcaaagcgttctcccaggaggtcaatatgcaggcgacgctttgccaagtgaccttcttctctaaggtccttgagcagctggtagatggcatcggcttgtgattttgagattgctgcaggctgatgccgtggagttgtcacttctggttcatctgcgggctccgtttcgctttcctcggagggctcaagctcttctaacagcctattatactcatcctaagcttattatcagtatgcacagaggctattgtaaggagacttctttccttacattaaatcggcgacgcagatggacgaagacacttgtcttcttccattccacatctgaatcaccttggatcatgcaacgaagcaagaaggaagcatgtgtcccaaagacctcagctgactgttctcgggtctcacatgagccatatgtatggtaagtatactaaggagggataaatattaggcttcggtttgtatagcgcatagcttagaatcgaaagactcacttgttcgcagagactcctaaaagatggattgatctgtctctttccttgctggtgcttatcaaccaagaaatacagcaagtcaatagcctggaccatgcgattgtatgtgggtgtgaaacccttggcgggcgaaatgatgtcgtaccagcctgccttaccagcaacccaaagctcaatgctcttgtcttcagtttggccgtaggcatagtgtgttacttcgtcaataataatgcgcttaggagggttatccgggttgagcactggtgggcgagtggctggtcagcaagctgcttgataaacgcgcattgatacaacgatacacacctaagtgttcctggtcctcatgaagcggctctaagcagccgatcacctgcactggattttgttcggtggcatccagtagatttgcatatagcatctttccaggctttaggaccttcacatcggtcaggctgaactcccaccaatcgttctcgtcagtaacagagggattggtgggagctaggacggtttcttcgcgggacgtcatggtggaatgggcatggtgggtatcgacaataaggtatggaaaagtgttgatatatacgtaaggtcaattaactgagaataagagaataagaagaaggcgacttggaatggaaccttgtagttgtcaacagtcaaagtcgtcgaccgccagtaaattacggatacaataagttactcataattaattacatgggtgttctgcctggtttatcgggcatttataaatgaatccatcacgtgcacatggcataattacataacttagaattaaggttacagcggtccacggatccacggctctgatcaaaattagactccgatcggatctcagctttgaaaaggcatacatatgcatgtacatatctaggcacgccattcctagagagatgctctcggtcaatacaatactggagccgctgtgaagtttgctaaggtatggtaggagccggatccaccatgggtctaggtttgtgaccgattacgcaggatgggggttataagtggaagaatatttgatgatcaaggaataacgagatgtgtattaagtttcgatgctagacgcggggtgtggggaaagcattttttgaacgccgtctcaattaacgctttcctggaaccacaaaaaaaaattggaagactgaagccactcatttatcttctttcgagggcatccgtaactccatgagcagtgtattatcctctaggctaagcaccacattgtcagtctgtcaaaagagtattttgcttttgcatcaacgaagatcgtagactttacactgtcatgattgcatctctaagagctgttaagcagagagccatgtctggtgttaggggtaggcgaaccttgatagaaacttggcagttgcactccgatagacgaggaagacgttggctggtacagctactaggtcaaggcctttgtatttattcgctatataaaatcagaaaaatccatgactattaagacaaagtaccaatgtattccaaaggtagtcagtacggagtagtgtagaatagtatgtcaaggggtgcggtaacaggacattttgaactactcaatgggaatgtagatatcatcttggctttccctttatgcctgttattttctaccataagagaaaatagactatgaaaaatggaatctactaggacatcaaagatcaaaaaagaggcacaatgccttcaaattgcacttttaagaaacattaaaataatgccgaggcttttcatctataagtgctgtaatatctgtagatatctccaacaatgatctagaaacctgtatatcaattatatcagaatcgtagggcaatcgccttgtcagtcccaaagaactgccgtaaaggcggcagccaaatctctaccaaaataactttttcccccattttggattgactcccacctttccagatgccatttcctccaggttttcggctttttcgcaaaacaatgtctggcgagaagatccttgaaggcgtattcggtgagcttgaatcccactaaagcaagacttcgatctaacatctccgctagccgtccacaagccgcaaggcgtcacctccgccgacgtgatccgtactttgcagaaacacttcaacccctccaagacattcaaaccatggttagaagaagaacgcgcccgccgcgaccgtgagagccaattccagcgcaaacgccgtcgccaccagcgcctcgacgtcaagatcggccacggcggcaccttagacccgctcgcgacaggcgtgctcatcaccggaatcggtaagggcacaaagtccctccaggatttcctggcctgcaccaagagctatgaaaccattgtgacctttggcgcggagacggatacctacgatcgcctcggaaaaatcgtgcgccgcgcgccctacgaacatatcacacgcgaagcagtcgagaaagcactggaacagttccgtggggaaatcatgcagaaaccgcccattttctccgctttgcgagtgaatggaaagaagctgtacgagtatgcgcgcgagggcaagatgccgccgattgagattaagcaccggcccgttgaggtcttgaatatggagattgtggagtggtacgagcccggcacacacgagtacaaatggcccgaggtggagatgactggtgatgagaaggctgtcgctgagaagcttcttgatcaggaagcatcggtgcctgcgccgccggccgaaggtgacgctacaagccaagcgcccgaagcttcttctaccaagcgcaagtcgccacccccggcggatgaagtgaaggatgatggtgcggaggctgctaagaagcagaaggtgtccgagagcgaagcggcacctattgcacctgagcctactgcccccgaacctgcaactacagaggcccctgttgtgcctgcagaggagcccaagccccagcctccggcggtgaagattaagatgactgtcacgtcgggcttctacgttcgctcgctggcacatgatctaggcaaagctgttggtagctgtgctctgatgagcgagcttgtgcgcagccgtcaaggtgactacgaactctcccctgataaggttctagagtacaaggaccttgatgccggcgaagaggtctggggaccgaaggtggagaagttcttgacagagtgggaggagaagagagccactaaggctaaagctgaagcagcccaataggctatagtctaaaatgatatagcatttgtatatagacttcctatctgtaatatcatagagaaaataaatcaaaactgccattttttggttatccagacccaagcgagaaaaaataattacatgatgcacgatacaaatgcaatgtcacaacataacccatcacgtcaaaacgattagttgcgtcccttggcttggactctcttgctcttgccgggtcgctttgcgccaaccttcatcttcttagcggagaagttgctcagatcaccactggacgcggcatcaccgctcttagcatggcgcttcttgcctccgaatccgaacttggcgtccttcttctggcgcttcgagccaccggggccatcaccacggctacgcttcttgtcgggctgggtagcttcttcaatggcaacgtcgaacatatcattggcgtcgtcggtaggggcggagccatcagccttgcgctctgtgtgaaaaatcaggttagcgactgcgaaactcatagaaaaataccatgaatgaaacaaagtgagaacatactcttcttcaaggtgttgatcttctccaacatttcgcgcttctccttgtgtctctgctgcaacttggagttctggacctgcttgccgaacttcttaagatcacgctggcggcgcgcctcagcagaagccttcttgccagcagcctcctcgtaaagcctcttcttgatcaagcccatgtgctcgtcattcttcaccatctctgcgaagtaatcgcccggccgcgtgaagggaatgccatccttcttcagcagggcacgtgcttgggtagcagcaatctggcagaccttgtagaacgccaattcacggttcaggtcgtcatttgcgtcttcaacctcgatcggctctttcgagactaaagagttgtgctctgagaatggggtgttgggaccgatgaacgagatgcgcttgagggcggagaggatagcggcagagttgttgatcgtcaaacgttggtggggaacgacatcttcacgctcatcttcctcgaggtcggagagtgggatgtcttcttcctcttcctcgtcatcttccatctcctcgtcctggtcgacctcttcctcttcctcttcctcttcttcctcggcgccagagctggcggccttctcttcctccttctcttcctccttctcttcctccaagatcttgtcctcgggggcggcagtagccttcttggccttctttttttcggcggccttgatcaatttcttctgcttctcggcctcgaaatcacggcccttgtgggcatcgagagcctggagtaacttgctgcgcttgaccattcttgctttgtgttaaaaatacaaagagaaaattgtattttgtgtgatgtgaaaggaattgaaaaaaagaaagcgacttggtatcaaacccgcatcagagaatccacgggatttttttgaaatcgcgccagtcctgatcaagctagcgttaccgataagaccaagctagtccgtaagtggaaatatttcggaaatacatatgacccgatcccttatcgagcccaccgccctcccctccctctctacatgcctcacagtctgtacagcgaatgccatagtctcacaatggccgacgaatccaagtccccttctccagacaagctagagagctccctaccagagggtaagtctcttctatcccaaccggtacataccatcttcaagctccaaactccacctgtcgctcttactaaatgccatcagaactccgatgctcaaggccagctcaccgcagctgtggacgatctgctcaatgagctacaaagcaaattcgacaatgtctctacggagatgttcgggaaacgtgagttcctgcctcaatcgtcttccaccaccgccaatacattcatacctgcgaatgtgtactaacctatgtacatgcgcagtggatgacatgaccaagcgcctcgacgagctagaggcgtctctggctgctgcatcttcggggactggcgcgccgagtccgacaaaataaatatgaacgccttttacccatactccgcgcacagcgtttttggcgagagtgcaataagcgctacactttttggctgtccagctctgctgaacccctgtaccaattgcgcaacacatacttaattatggcatacatggtgttttctaaggctttgcatggaaccgccgtgtagcatgagcacaccggcctgtgtctggttctgatacttatgcttttacgatttcatagataccctacaatcaaacgaggatactcgtacagaagagccaaaccatgtttcgtcatttacttgcgtggatctagttcatatataacatggacatttttgaaagggtaaacccgaagttggtactcaattcatacaatatacagcatcaagcaaatattctcgtatacaattcaatccatttccattgaacccatggttcatagcatgcccggtcctcaatctagaatcaccgtgactatagccttaagccaaaaatccaagaggaaaaaaaacaatcatctagaagcaatgacaagcacttaaagctcatcgtgcttctccgcgccaacaaagctacggagaatgttgctgcgggagagaatgtcatccagcttctcgggggccgagccacccttagccaggaccttctggaggcgggccagctccttgacagcatattcctcgttcttgctcagcttctccgcggccttgacatagtactcggcgtacttgtcggacagaccctcggcggccttcttaacatcagccaccagattgtcgaacttctgcgccgcgacgctctcgctaacaatcttgtccagaacggcgatggtgcctgccaggctgtcaagaccgccaccgacggtacggtgagtaccagccttctcgttgatgaacttgacaaaggcctcctcggagcgtgcgccggagtaggcctcgggttcggtggagcccttggggaagaacttgatggtagggaatccggtaataccctgttccttgctcaaagcacgggaattctcggcttcggcgtcgaccttggcgataacaacgtcggactcgagggcgaagtcgttggcgagggtttcccagacaggagcgagggtcttgcagtctgaacaaaagacgtattagcaaaacaaaccacaagactagaggtacaattagggagtcaactcacgtccacaccacggcgcggtgaaagcgaccagcacatccttatcgccaccaacagcggtcttgaaagaagcatcgttcagcatctcgaccttgctagcctccttctgtgcgctacgaggcttgatgccagtcttctcggtgatgaaggcagacaggctctcgagatcacgaccacccttgtattcctcgggcttgtcactctttccatcgaaccacttgacagtagggaagccctggataccaaagcgcttgcccagcgaacggttctcgtcagcatcgaccttggcgatggtgaccttgtcttcggcgaaggcgaaggtctgcgcgagctcctcgtaaatcggggcaagggttttgcagtgaccgcaccagggagcgaagaattcgaccagtgcgggcttgccagccaggacaacttcgtcgaagttggtggggattaggtctttcactgcggagttgcttgcagtggcgacgccgctgagggctgagagggctccgaggagcaggaagcttaagcgtgccattgtgtatatggattttgatgtgagtatactttcggagaaagtatgagttcacaaagaaatgtggatggcggagtttaagctcgggggagacgatgacaaacaaagccgaagaggccacttggtgactccacaccgcagatcacgtccatctactgccaaggttgacatctacgacgtccataatataaaatagagctacttcccctatgctatatttgtgattattctgctcttgagtaatccaagagtttcttcttcgttttcttgatttgtttggtctctgttgctacctagatagttagtaatacactggagaattgctggtatcgtatttccttgggcaagatcggagctgttggcataaactgcaattgcaagctgcgcttgttaaccaagaatccccgcggtggttgatgggtgtcgttggcgaggtttgtccatatcatcgtctctctgccagccatttgtttgcgtcttcccagagctctgcttctttgaactccttgcccgtactctgtgtgcctacgtaaacctatcttgaaaattagcgtctggtcaacattcaacatcaggcaatactaaccgcatcccacagcttgaatgccaaatccaagtttccaataaagctctcgctgtgttggaaccattccttgccctttgccttgacatccgctcgagcctcgggagatgtcggattcgcctgtagaggtaggtcgtcgaggtaagttcgaaccgcaattccaagtccacagtcattatcatcaataaacggaagcctgggagaataggttagaacaggatacagcagagctaggctaaaggaacatacttgatagccatgtcagtccagtcgttgcggtcccgatcagcgtcaccactgagcagcagaccagccagtaccacctcgatcagattcctcagtgcagagcgcaccgcagaaatcaaagagcggtagcaaagaagttgacggcttaaaggtccagaatatccaatgctcttgtgctgaagcttggcaacgcatgcaacacgcgaaaccagcatattgaaggtcttgtcgtcttcggaccctctcatgggaccgccagatacatgtgagaaccagttcttagtgttgagaagacccaagcggatcatctcaatcgcaatgaatataggttcctcgaggttgtccgcaggatcgatggctgatagtgcctgcactagacactggccccacggagtgagcttgtgcttgtcgtcaacgtatccacggagttgtaggaagcgccacataacattagataaaatatcctcctgcaatgaaagtgcctatcgaagctgttagtcatcggtagtgtcaactctataggtaagcttacaggtgtttctttattagcaaatgacttggacgcaaactcagagtcacttaagctctggacagcaaacttaaacgacccgcgaggcgcctgaagcttcttgatactttcggggaatttatccccatggatcttccaggaattgatggtttccttgactgatgggatgcccttgaggttgatcgtccgctctgagttctcatcgaaccatgggcggatccgaatgactttcgtttgatagaatcgatgaagcgagtttgctaaaaggcaaatagactgggtgcggatgggtgtcaaaatctcacccacaagccggcggtaaatctcggtgtcttcggtacccagcggtagcgagatgcgaacttcgccagtcgtgaggaagttgggtacatcagctccaatgatacctttagagagatagaagtatagctcctctgggaggcgctgcccgataagctcatgcatatccgacgaggtattctctggatccatgggtccgactcgaccttccacgtcaatatagacatgatgcttcacaatcatatatgctcgcttatacaagtctgcgtagtgaagctcctgcatacggcgatcttcttcaaattgggcgcacagtgtcaatgcactgcgtccggctgcgttgaacatcggcaacgcatcacgaatggtggggcttttgccggggtaagcagggttctcaaagagtgggagggagcgcaggaagggggatcccagtagtaaacagaagtccaggaattgttcatttgaaagtcgacccagctcctcctggcaggtttgcttcgtgatccagaagaattgcgcgggctcggtgtcgatacgggtgaccagcttgtcaaggtcaaacaagagggcctcggagggggcgaaaacggcatcgactacaggattgctaccacgggcgaggtaggagagctatccataagaattggttagaacttacaacaatccaagcatggcgcataggtagccactcacctgagccacggcgctgtatggcgctacgatgaattccactccgttctgggtcaagattcgttgaaggaacttgaaaagtgtctccgggggcggggtgcctgagggttcggttgtgtcagcgattgtttgggagcttcgctgtacccagtggtaacgatagaggcccggcaggtccatcaccagggaaagggtgaaagaaggatagaaggtggtcataccagcactgctgaaggcatcgactacctggtctgcctgttgctggtcgtaaaggtcccaagcttggtcgaatgagcgcgtcgatgcgggctgggcgcggtgctctttcttgccgaattccaacccattgaagacgaagatagtggcgacaccaaggttcttgaaagtctgcaattccttctcgatattactcctcaaggcgaacgggaatccgcctagtgcgcctagaagcgcttcccgggttgactggttcacgagatgttggttgatgtagtgcgacgcatcaatgccaacaacggcacccttcagtgctgagaggggtagggactgggtacggccaacggcccattcatcgagaggtcggactagtcatggagataaaaggttagctggtgcgattgcgggttgtggagctgtgttattgcatactcggcatggttctggagcttgtctgtcacagggctgaaagcacggcaacgccgggcatcaaagcccgaaggtggaaacaggaggttaaatcaaaggatataagagcagatcaaaagctccgtgatcacaatatgatgaatcggagctgggattgtttgggttttccggaatgggggagggcgagatcacgagggggggaaggcggagttggagttgtccttttgttttttgcctcaaacgcatcacatcaatttgtttttcgcgtgtttcaaccacttctttttggtttcgggtcttttgtgggtgtattcgatttagttatgccatgttcaactcctatctgtgtattcagatcctgattatctgcttcctataggggaatgtacggcttataatgaagtcatgcccgatatgtgtttaaataggaacaaaacagtcacaattcgttatagcgtacaacaaaatcgtctagacaatgtttatcatccttgctgagtgaattcggcgtatatttataagatctatgcccagctcaggtgtataactaagcgggggcaatgacacatccggcggggttccatgtccattcaggtcggatatcgcctaactgactggagccgactattaaacaagaaattggattggttggacgcaatttgattatcgcgatattgaagatacgcgatagtcaatcatatgtgcactaatagtggtttcaaccctatcttcaactatatattcactccaaccttgaaccctaactgctgtcctatttctgtctcacttcagaatggcagacaccacagtcccaatcgagctccccgtcattgacatctccaatccccatgaccccgccgtggggaaggccatgctggacgccgctacaaagtatggctttctatacgtcaacagcaagggaaccgatttcaccgtggaggatgtagatcatgcatttggattggtaagacttgcattacactccaactgttgacatctatatgcataacatctgaccatctctatagtcaaagaagttcttttcgtctccctcacaggagaaggagacatgcaagatccagccaaatgtttgtaataagactaaaggcaaacaacacatccagtctaacaatatctatagaaccgtggctggtctggaatgcatacagaaaccctcgaccccgagcatcagcgggtaggttatgacctccaacccgcatatagtacgaagactgacacaggatatggcaaatagaccggagactttaaagagtatggaacaaccatatctccaagccttgaaatacccccaaccatgaactaaccacacaactagagccatgaacttcggcgacttcaaagacagcaaagcccaacagcttctgccaccgtcactggaaccccacgaagcagagatcaacggcttcgccgaactctgcaacaaaacctgcacccgaattctgactctgcttgctttaggtctagaggtacgtaacgccaccgagtctatacatccatcataaccaccacgcccagtcacataaatatgtaatctataccaaccatcaaccctagatccaagaagacttcttcacaacccgacacgacccaagcacaggagcgacaggcagcatcctacggtacctatactacccatcaatcttctcaccgacaacagcagcctacaagcacgataaggacgtgcgagccggtgcgcactccgattacggcagcataacacttctcttccagcggcccgggcagccagggctagagatcctgactccagaagacagctgggcgcctgtgcccatcgtgcccggcaccgcagccgaggcggaggggtatccgttcccgccgatcttggtgaatatcggcgacttgctgagttattggacggatgggctgctgaagtcgacggtgcaccgtgttgttttcccgcttgctgagcagcggagcccgaatccgcaggatcggtatacgttggtttatttctgtcatcctgttgatgagacggagttggtgcctgttcctagtgggattgttgctgcgcatcgggagcggactgggggtgttcctgctgatgggagggttggatttggaggtggagcggggaatttagttcctggaaagaggcctttgacggcgcatgaacatcttatgtcaagattggaggctacgtatgggttcactaaggatgagtgagggtggggatcacatagcttcaattttggcgctctacgaagcctgaattaccgactacatgtagcttactgggcattgggtagatgggaacagagtcattcgtgagactgggaataaattataaacgccggtgccgttgaggcatagtgcaaacacagaaaagacaggtcctccggacataaatcagaatcatagataggatgtgcaccaaaatgctccagatgaccataacacgacccaagttgtcggcaattatgcccatctactgacataggaaagtcgtgacagcgcaattagttatgagagaaaacataatggccaaaaaaagcaaaaggcaatgggcatattgccactggaggttagaatgagatatacagtcataagaaatggtcaaatgtggatgagcaatgaaacaagggctcggaaatgacgatccaacgtcaatggaccaagatgaaggcaggctgtgcgagaaagggaatatgagaaggctagacatataaaaggtatcttcgggtcgaaatataaacgccgccagattctgaaatgccatgcgcaagaggaaccttggaacagaatgaaaggcagacgcaagacggatatgacgctatgcgagtcggtatgcatggaaatcaaaacgaaactcctctggggtcgtcgggtcgtatcaaggggtcgtatggcaccagtgccggtggtatacccacgcggatttctggcaatctttgctgcagtatttggtgcgacggcaacgccgacatttggcgaactggcgctggaattcttcccacttgccacacttgtaataggcgcattggcggatgccacctctcgcctcatccttacggcagaggtttctcatcaccacgcacgcccagtattgcatgtccttggagtgatgtcgaacagtatacttctccactagggggaagatgttgaaatcctcggaaagaaggtactcgtcttcctcatcacatatatcagggggcgaaggggggcaggagtcgaagtcctcatccaaaagatagagctggtgatcaattttcaacttggggacaagatgggatgactggaagtatgaccggaggttgcagtatttggagacatatgctagtagctgaagagacatcaggacatcctcatcacggggcatggctgtcaagactccttgggctgcgggacgttcccgaaggtacaaagcgtaggagctaggagcgagagtaggagaattaggattgttggtagcttgggtaggagagagaccgagtccgccgttggcctgtgtgttgccgttattaatgatgctgccgtcgacagtcgaacgatgagtgatgttgaaagtctccacctccgggccgccttcagatggatcagtgacggttagatcatgggcgttagagacaccgtctagcatcgttgtgtcccgctcgtcaacactgtcaagttccatcctgttcgggagtccaacaatggtttcagcgggctgtcccatagcactatcgtctcccatggtcgaatcttcgccgtgggcatcatccgattcaccggacgccgactgctgctggcggatcaaaggacgttggcgggcggcaatagtctggggaaggctgcgaggttgtgagtggaggggaccacttggggtggtcggggagtcaggttgtgagacgattccggtctgcagactgggaagcatgctaggaagacgctcggtgtcacgcacaggacgtaatccgaatccatccgtagtatccatagagggaaccgcggtggcaagaggttgcattgaccgcaggcgattgctagcgcgcgggaaccgcccatcgttcaaccggtggttatgggcttcttggccaaatgtactgcgctccgggggagatgtcatagggacacgaggaggagatgtgatatccatggcatcggggtcgttaggttggctgtcttggtagaaaggccgggggatttcgatactcggcggaggggcttgtcgacgcgagtggtgcgactcgacctgcgggtgtgactcggtctggatatctacgtccataggggtggatcgagtggagacgtctcggttgctgctgggccttgactgcctggaagaggactgcttctcggaatcgagatcggtgcgcaatcgcaccttgtctaccaccttgatgtagttgttcagaatgctggcaatgactgggaccatgtcggcttccaccactcttgtcctcacactctcagagccccgtacaccaatgttgacaacacattgaaaggcgaggctccatttccacatttccagtaaatccttgctccgaccttccttgaggatgcataccaatcgctcaatgccgccatcgacggtgaggatatctcgaatccgggcggacgaggttgtgaggtatgcaagatggttgagagagttgatgagcggtaaagtcgatgtgcaatcaagggcacggcggtcatagagggtagtggtgatgttgaccgcggccttgttcacattgggaatactgaaattgacttcccgcatgatgaaagaatgaaaacggagatgtgacgaaagagcgagggatcaaatgtggtatcgatcgatgcaagatgacatccagagatcaaatgcaaaaatatgaggaccttgacggatattgtgtaattcagcccagagagattgatgccgactgcggattaggaactcgcgctgaggggaatcaatccaaagacatcaggtgaatgaagagggcgatgggttcagatttagagaggatgacccaagaagcagaagggggcgaaagggcatccaagactcagactcagagggtgagactttttaaggaacgggaagggcgagaaatgaaagagagaccaaatgcaatatgcaatgagacgatagatgcgtctacgcagtattcgataagatgatgaagattgtcgatggaggggaaggggagagaagaggaaggctttgcgaaggcaaaagcggagagcgtcaggtgcctccttaatattaccaaatatgggttgtacccgacacagaggcatttggcgccaccttgggggatttacccttccctcccttttttcccttgttgttttggtgattcatctgtacttgtacggaacattgtattctttgtttattcgcatttgtctcatttccgatctttgcaatctctctccagtactcgacccttctctgttacattgggtaccgacctcggagttgccactcgaatatcaaaattacatatccttcttcacataccattacatgccataggatcaatcgataactgtcagatcataatacgtacaacgagagacgatcgctgccagattctctaggttatgcctgatacagacggtacaggcggaggctgtagatctcgagcagtgaccatcacaatccaccacccgatgaactatttgaatagcttcggccgtttgtcctgaatagaagaagtttggaccgaaacagatagagcacgtagctgctgtccccataacaactgtgattccacaccacaaatgagttgtgttacatctatatatcggcgacgtcaacggcttcaaatgactagttaaatgactaggtcttaggatcaaagaaataatcgaaatgcttcttgtgcattttacgtcgaagctgtttatgcacatctccaagtatgatatacattccgtcactattgatactacgatatatgatagtccaaatgggattcaaatggctcgtggaacagaatcttgaaaatataccacctggcctggaccctctgacccctgatggctacacctataatgtgtaatattggtggagtctagtatcccataacctttctgatactccctgatgccgtttcatcagccctgaccagggtagtttattttgagaatgtgtttaaacttagcaacaaacaactgacagcgacttgctgaggaccaatcgattacccccgcagatgtgatagcgttggcccccaaggcctccatcacatcttgacagggtttacaggcgcctgcaacaatgtggcgcacagacggcgaactaagattagaacacctgcgaactgccgaagggaatccatgtccgcctgtttgcacctcgaaattttttgggggggggatcaagtttttttcgtttcatcctagggcaaggctttgagaaagacaataatagcggttatatcggttaggggagggatgatacattattataggcccctgcgcaagatcgtcaagcctaccccgccagactagctcagttccattggcgaatttcggatattggattggcttgacaaaattgctagtgtctatggaggttcatttggtactagcgaaggctacttctgcagcctgctttgtgtatactccttacaaagtacattcgtcttcgttctgatcgtcttgtctataaaaggggcagctcggtccatcgtatatggcccctttctcataagaagccaaacttagtcgccggagtatgaggtataaaaggcactcccccagagcatggcaagagatgttcgtgcaaaggattcctggggaatttcaacatccacaagttactaggatacaatgcagcgtccgaatctttgtaatatgtcttccagcatccgttgatatgcaaattgcttattccatagccggcgagtacaactatctttgagacattgtgttattaggccacaggtacacttccgtgtaaggagtcaggtctgggagttgaatctgtgcccgcagccttgtactgacacgacaacgtgctctttggaacctatacactcgtgatacatcgacttccgatcgcctgccacttgagtaaccggagagacgccatatactcagtagatctaatatgcacaatgcacgtgatgttgacattcattattcctcaagaaggagggaatggtcagaacttctctgagataagccgcatcatctcgttcttgaatcagaatgttcagtgcagggattcggatgtgtcttgtgatatgacgtaaactataactggttctgcttgggttctcatccctggagctgagggcgtgggaatggtgacacagatattggcagtctctcgtactcggtttcttttgctttcttccaaggtttgtcataggtgcttactcaccatgttgtatagttttgtatagattgcctaggagtatgagtcaatatatgactgctggaatatcaacggcatacagtgaggtccgtttcagatcacagccaaataatctattagacttcggacatctcgatctcggcgttggcgggtgcctttacagcccgagctgagatgagttcatctctctgatcgagggtttggatcatgactgtacgtacagactaacccatgttagaccgacaggtaatcatggctttctaatggcgtatctgactacgttgtgcctgaaaaggggaaaacaactattgtcgattcgctaagataaaagtggacaagggagagagagagaggaagagggagccgaactatctgatggtgatctgggtccacatgggtgaccgccttccggtcacccaacatcccccctacagatctcatatctcctgttttgaaaatgatgatcttaaaatgtcgtaatcgtggtagtcgtaaaaaaccccaaattttcctttgaattaagtcatcccaataagcttcaagaaagctcggaattgctctttaggaagcgccttcgtaaacccgtccgccgcgttctgctttatatcaacccttaggatatttatatatccttaggccacagcgtcctttataaagaaccatcggagtgccagccatctggtagtagacttacctcccttctttattagtagtaactgtaagttaatattattagtatagataactgtaggatcgggtcttagtaggcttagtaagtctataaccttagtaagccatatagtatcccgggccggctagttaagtgtatactattctactattattatagagttcgctataatcgtctactttttagtagactaagctactaggactcctataaagaattagatatatcctttagttgatttagagtctatctagtctacgtataatacgtctataaatactataaattgtagttcgtccaactttctaaagattagtcctatcttagggttatatctaaggtacttaacgatatatcttattgccttaagattagaaaaagtcggtattactagtctatattataggtatataatagtgaatctaatatctagtcttatcttaatagtaagctagttaagtatccctactactatttagtagtattcgaaattctcgttatcgagtagattagagttaatatcttctaggttagactctctctatcctagtagtagtagtatttcttttatccttatagtatctgtaatatatagaatcttttatatataggcttcttaagatataataatcgtcctagcgttataatctctattaagtatatagttgagatactattttagttctcctaggtcttttatattataatatttcttaagttactttataactaagtctatttctctggaagtaggtatagtaataataaagttattgatatagattattataattattagatctatatagttctttcctatcttaatatagatatacgggttatccttaaagggtctaaagctagtttattaaagcttatagtctatctccttattctaaaggaaggcagagtcttataggctaaaaagagcctagttaagtatatatacctattactttaaatttccttctatatctataaactcgaagcctattaactgtcttatatatactatctctatatcttctcttaatatattaaggtaagctactataaaatccacttaatactatttaaggctatagactacaataagtattaagacaattttaattatcgtttctaatataaccggtatataagactcacttaagttatcgcttttctcctagaagttactatagataacctatcttaccttaaagctatagactttatctcttatatttatcttaatagtaaaacgctattatcctagaaggacttttacctttagtagttttaggattaatatctatattctcttcgcagtaaggttattaagctatttttctattacttccttctatttattctagaaaggtgacttttatatttatttaaaacttaatagtaggttaatatccttattataaagaggttttctgttatagataaaaggtatatctatatctacctaatcggagttatctagagaaagtttctttacatttccttcttaagaagtaatatatttttctgtatacctggtatctctcttttacttcttatattcaatatttaggagtttttatttaggatcctaatatctctctagtaggatactaatatttctcctttttaatctcttagctaaaggttcttaaatttaagttagtactactattaccagttctacagtaggtataataggagtaaccttctcctatatctatatcggttatatagtataccgaggcactttataagtaccctacggtaatatttattatatagtagtttcttataaactacgttctagagtctattaagttagtaaagagaaaggatactagtactctatccttatctattctaggaacagagtatcttcccttagggttaactcttatatagagctggtttccctaattaagtcctattcgattaagtctatatactagtatacttctagtatatctatctcttctacattaattctagctataagttccttaagtcttctctagaaattagctttcctctctgctagcttctctgttattattatttactctatctaagggattatattcttactataaatagcctatatctcttcttaaattagagtaagagtctggttaactctttatactattaactgttctatatttataggaattagtatccctttctaaagtctcttaaggatcgatcttatataccttagtataggaagtaatctctattaataaggtattactagggtctctagtatagttaaaacactaccttaaattataggtaagtaaattattaatagggttactagatcctatctatagactattataatctctatccttagttcagttctagctatattaatcagtaggatagaaatttcgtttatattattatctcctagaggtttcgatagctttagcgctattagtactcttccttcctaatctttatcccctagttaaggaaagctgatatcccttaagattataatcttcctagtttctagattctagatttttagaatatatctattatcccccttataacctataagttatcctttctaagatcttagagtggctttatatacctatactctcttctctttcagaatatagatatagatagttgttccctatagtctaaggtactttagtaacggatctaggttatcgattccaagttctgtatactagtatttaagtagcaatatttaagactttagattggttaatctattaatagtatagattatagtttctactatatagggctatagctccttaggtagcttagtgttaataattattattctctagatatcgttaatatatccgctaaagcgttctactgtaccgttaggctctactatatagggtggtataactttaaaagttattcccttttttataccctaagtaataaagttcttaaattctattctactatcgagtctttatactctggggtagtacctagttcggaatttaatttttttataaaatacttaaagtttaacgaatgctttacctttatttgtaagagtcagtcccttaagatatcttattgcgttattaagaataggtatctagtacttttcactatttaggcccttaggttttataggctatatatctatataaaatttctatactatatcctaaacccgaaattgtggcttataagaaatctgtttcttagatttaccttaaaaataagctttatagttaaagtattctattctatactattctttatcgttaagctcttatacttattttagtattaaagtaagtttagcttttctagtatatctaaggtatcgatacgccttaaaggtagaaattttattaactaatcctatttctttgttactatctgacctataggataaatcttttttatataaattgttttctttaggactaataaggtatagaactctgagtaatatatttataactctaacagtttttctagtactatctgtaagtcgcttagttcttatattatataagatatcctattcttctaggagtttctatatactgaataatttactataacctcttaggctatagtagccttttattaggaaggtatatattattctatcttcgagatctactttaataaggacctctctatatcctttagttaccactctattactagagtagtcctagtaggtatataccgattctaggctatccttctagtatatatagaaatcttcgaagttataggtaagtattttatctaatctagtattaattagctagctgttaaaactatctatataataagctgttactataatagctatattactttgtccctcgctttatagtatgatcgagtaattctatatatataggctatatatctagtatataggtagatcttctaatagataggaatacttttaagctttatatggcctaaaactgtagtaggtatatatcccactcttatctctttatattccttccttcttttccttgatatacttatagatatctttactaggaggtagttagtttcgaagggtcttcttcttcttaggttcgttagatatatttaagttatccttcgaagatttattatcttagcttaaggaggtttcgctattacctcctttactatccctcttatcacctcgtcctctatatcctttactatggttattaccccgttcccttaaggactaggctgtattagtagtcctttctctatcggaaactgcctagaggctcttataatattagtctatctttttgagtatgattttcttaggttcaatattactaatttcctcgataataaattaaaccttagatatttctttatctaattattatagaacttataatagtatataaaaagggtgtggttaaattttgaatcgcaaaagaatgtggtattatttctagtattctataataaattccttcgcagtattaaagtccgctcgttttattttatcgaactttttagttttatttagcgtattttcggccttatcagagccttatactattaatataattttatcgaatattatattagcgaattctaggaggtataagagattctggattcgttcttagagtatattgttaacctaaacgtatagctagctagctactatatataaccagtactcctatctattaaatttcgggttacctacagtagggcgaggtatactgctattaataatatattctagtcttaatagcgcgagagtgaatttcacagggatcgcctatttataaggatttctggaattgtactcgagtgctttaactttctacattttcgcagccgagatatcaggtaggttagtggcctgattcttcttattatatctattacccgataacattgtattagcctggggttgagaggtatttcctatctcccgagacgcgttgttgttacctgatggcaaaaattgtgactgattattcgggttgttatccctagagtcgataccgctatcagccatgctaggagctggtttaccaattctgttattaattgaggcttgcgaggattaaatccgattggcgagaaacgcgcgttatgcgggttaagcgccgggaagtggggtccaggaaagagacttagggttggaggttgctagcggtccttgctagctagagacaagtgctcataacctaatggcgtatctgactacgttgtacctgaaaagggaaaacaactagtgtagattcgctaagatctaaatggacgagggagagggagagaggaagagggagtggaactatctgatgatctgaacccacatgggtgaccgccttccggtcacccaacacatgagcctcattttgtatggttgctggaatttaactacagcccaagttatcaaataggtttatgcgaaatggtcataatgatatctctaaaatacggattgttgtgacgcccccaaacagagacacgacgatgcaataaccactatgtgacatgaaacatttcgaaagttgtttggaaacgcgcagattcttcgctgtgattgacatgtgatcatctgcctcaactgaacgtcccattagcaggcccaaaatacccgacagctggcatcgacttgtatggtacaccctgggcgtcggcagtattcaagtacacgttattcccccaccagtcagggaaagtggcaccagggtacgagatgcaaaagaaaataacaatgccactgagggcaagacctgtatcaagggcagctgccaagatataattgtacttggtccaccaagcaaagaatcggcgtttaataaagtgatacactttctgaccaatggatgttttagaaggttcgggatcccactatactagttcaattgcctgttcgtggtttaatatagatatgtatatatgtatgtaattatggagtaatgtcactgcaaatctccgatgatgagcatctgcatgacagacgccatgtcgaagatcccgagtggagatcttggcaggagaggagcacatggatattcactgacagggacttgcccctgaacatccatggatgtatatagaatgacgaacgtatatccaacggagagcaaacgccgaagactatatcgagccgatcttccccgaaatcgaaatgcaacgtcgcagataatgatcgtccaacagtcagccgaagattcccccgggccggagttaaaaaagaaaaaggggggcaagacagcacaatggattgtttggtggagactgggcagagatgccggcttttggctcggagaaaaaggcccagaataagaatccttaaaagaatcctccaagaatcccaaaagaatccctgaaggaacaatccctgtttaatttatctctttaaattgcgcttaccaatgtcctggaaacggttggacccaccagaacgggagttgaagccgaatggcacgatactctagggctaatatatgtcatatacctagacgcttgctattgcacggagttctccgtgcatatctccatcatatccaataattgtgatatgagttactttaatagccaatagatcaatacggacgtactccgtatttagccacagggccgtgcaccctgaacgaacgctcagtgtgaagcttggacctgcacggagtacggagcaggtcaatattgtttaagcatagattgggagttggggatcgggagaagatcagagataaatatggatatggcagttgcaatcatgcgagaatatcgactcatgtctggaatatagggtcatcttcttcacataaagggtaactgggacataaaaccggaattatacccagaatggacatggaggatagtccaatctccgttagctccataaaaattaccttctatgcaaatggaaaaggggaacgcaacgcaagggagtccatttagctcgtgaagaatgtattggcgtacggtacttgatatgtcctatgatacaggttgttcagagccgccggcggttaaaccgtgacacttggagtaaatcactctttgccgctgttactggctggatttacactgtcttcagtctccgggctagtggtcttagcacccagccgatcctcaacgccacaatttcgcatattctcctgagatcaggagggttcaggagggtttaggagggtttaggagggtttaggaggggtgatatttttttggctttgaaaacttggaacagctaactatgtcagcacaaagtacctacctagttaggtatatgtacgtcagctctagttcgaatatcaaccaaagaaaagaaaccggcatcaggtacccgtaaagcaatatagagtccactgaaagaacttgcagaatggaaatgaggaaactctgaactatacggaaaatatgtactatagtggctcacatatgtcacgatttctttcatgcagtacgggaaaaatacagaaaggtactttggatggcatacaacttgatagcaactgaaagtaccctgcttattcccatgtctcgtattaccactagtaatacgctgacctccctctccttgctcggtctttcaccccctgttcctctctctctttcttctcggtctgttccttttgttcctgttggctctttttccctattctcttattctcgacttttacttaacatattatgatccaagcctaaggccctttcactcggttccgcctttcgactttctctcccctgcttcttcgctccacaccttccattcagccccctctctacccttcccctctgccaatctttccgaccaccattgttattatccggggtacttcgacaaaatggccgatatgagcggcgaacagatgcaggccaagatcactgcggccaggcgcgaagctgagggtttaaaggacaagatcaagcgcagaaaggatgagctggccgatacctcccgtgcgactcccatcacccattgttatgcctaaagggtttcctccccttttcctctcctgggctgtggtccagtacatcgtcctaggagactcgattaaccatactgactttgctctcccgtctagtccgtcaagtcgcgcagaaccagaccgacgccctaccaagaattggaatgaagccccgacgcacgctgaaaggtcatctcgccaagatttatgccatgcactggtccaccgacaggcgccatctcgtttcggcttcgcaggacggaaagctcatcatctgggatgcctacaccacaaacaaggtccatgcgattcccttgcgctcgtcctgggtcatgacctgtgcctacgccccaagcgggaactacgtcgcttgcggtggtctcgacaatatctgttcaatttataacctgtcatcgcgcgaaggcccgacacgagtcgcgcgcgagctttccggacactcgggatatctctcctgctgtcgcttcatcaacgaccgccgcatcattacctcgtccggtgacatgacctgtatgctgtgggatatcgagtctggaaccaaggtcaccgagttcgccgaccacctgggtgacgtgatgtcgatcagcatcaacccgaccaaccagaacatcttcgtttccggtgcatgcgacgctttcgccaagttgtgggatatccgtaccggcaagtccgttcagacatttgccggacacgagtccgacatcaatgccgtccagttcttccccgacggcaacgccttcggtactggttccgacgacacttcctgccgtctgttcgatatccgtgccgaccgcgagcttaatacttaccaggtaattattttactcgagacatttgattgacgaaaactgacttgatattcttccagagcgatcaagttctgtgcggtatcacttccgttgcgttctcagtctccggccgattattgttcgcaggttacgatgatttcgagtgcaaggtacgctgagctttttcccccgcaacacgactagatgctaatctacttaggtatgggatgttctgcgtggcgacaaggtgggttcgctgagcggccacgaaaaccgcgtgagctgcctcggtgtcagcaacgacggcatcagtctgtgcactggatcttgggattcccttgtaagtttccctgcaattgtttatgcacatgcatctactaacctcggatattctctcgtatagctcaaggtctgggcctggtaaaccaaaaaaagcaaaacgctagataccccgtgtcgatcattctgcaatgctcttcttcgaaatattttaggctcgatggttcgaatcaccgccattgtacgataataatcaattaccggggagtcccttgggttcccacgataatacactacccgcggcgcagacatcgtcgcatgcgatacggaaggtgatggaggtggaggtgagcgctatgggatgctgtcccggcgaacaaacgatagcgatgacacaatacttgtttggacatgacgagagcgcgactagtccctgggtcgatggatgtacagtgactgccagcagaagggaatgctggaacgagtcgatccatccgacacctacaccgtcgccctcttctcaattccccttttacttctcgatgacgccctttccccttattttttcttctttgaattctttatcccccattcagtttaccgtttcgttctggtcatctccgcattggtctcgacaattattttgttggcaaaggcaaaaaagaaaaacctggttaccggattctagccaggatgtctctcgccgatctacctctgcgttaccttattattctctcttctcatttctcctttcttctttattctctcctatccccccttatttgtgtctcctctaaagaaagagtccgttgtacttaactgtctttgcgttggaatcttgctctgggattctgtggtgtcggattttgataatggttcaagcagctccaatttccatatgtgaactttttttttcaactcgatcttccatttcattgcactgaaggtggtgatagtagtatcgggaaacgtcggttcatgtctggcttgattctctaatgtgagcctggcgagtatcagacatgtcttgaacctcggtccagcctagggtagaacatgccatccctagatcatcctcgagggagtagtctctaaatagtcggatgggataccgtagcaggtagtacgaccttcggctccacgtatatcaggccacgaacacagccaagagcagtggctaggggaatgccacgcatgtcctcgacctcaatcacaccggtccacattcattgatgcctaacacgcagctcgccgattctgggatcgccttgccccatttctgacatgaaacaagggaatggacgtgtaggagggtcgtaccactgacgctagagagagggactaagacaatagttgtagtagaaaccttttcagaagactaggtcgaaataagaacatggacaggatcagcgttgtggttatccttataataagcatatacgctagaggagagttcatcctttcatatcaaaccagactgggaatacgaagatacgcatccttctagaaaaagaaaagaaaatggaaacatctagacctgaggattcattggtggagacatacagatctacatcgttgaatggggctaccttaaagtagacacttcgtccgtagacacgtcacatagttcgggatattatgaatgcctccacggggaatggagatcggagcatggagtagagctggtttcaaagggataatgaattggaaggctattgagctatcaagctattaagctattaaggtcaagtacgagtatgttagtatagcttgaaccgcttgatatacaacttgggcatacaacacgctataatattgtcgagtccatttatataaatctcgacaaaacattctaaaacaaatgtctttgaccttgacagcctcctagggctcggatgtcctatgtggagcctgaaacacaaaaaaagggggctgttctcaccgtttcatgacttccatggcttctcacgacgatctcttccaacctcagcctcatctccgtttcaacttcaggggcaatcttcgagtatctgcatatcctaatccttgatcctggtccaatccgaaacacaccaaacagtgcccgatcccagatctcccaaattagctcccccctctcacctaaaaacgcctttgcccgctctttcaacatgtccgcccaagaagaattcaaccagctggtgaacaataaccgttcacgcttcacctcccatccagaagaccaggaatcagaaccttacttctccgacgaagaacccgcctcccgcctccgctcccgccaaacagtcgactcctccgacgaggaagccgacgcagacatggtctcctcccgcaccgccaacgcaaactaccacatccccaacaccgtctacgaagccaacacaggacccaagggcgttatcgccgacgcccaggccttcgagcgcgcccgcaagaagtccttccgccgcaccctcctcagcgtcgcggggctcgactccaacagcgcctcctacagctccaagtccacccgcgatgacgtgcccctcgcggccggcgaccagtcctccgccagcgaggacgacgacgaggcccgcttcatgagcaagtggcgccagtcgcgcatgcacgagctgcagggccggaataatcgccgtgccagtccgcgcggtagacgctatggatcggtcgagacggttgatgccgcggggtacctcgatgctattgagaaggtgacgcctgacacggtggttgttgtgtgtatttatgatcaggaggtatgtgtgggatttggatattggatacaattgggagctaatttgttatgttatagttcgatgacagcgctattgtcgaggagtgtctggtcactatcgctcgcagacaacccactacccgcttcgtcaagatgcatcacgatatcgccgagatggatcacatcaaggcccctgctctgctggcctaccgtggtggtgatgtctttgctactattgtcgatgtcttgcgcaacattcctcgcggccgcagctgtagtgctgacagccttgaggacttgttgaagctgtgcgtattcccaggctcttgttcatttcgtactgagacatatgctaattctcgattacaggcaccgtgtgctatgatactttctttgctattatgttttcagtccgtccacatttatggcatagtagcaaggcgtcttggttgttccctcgtgatctcctctgcatgatttgatttgatttgatttgacctgacctgacctgacttgacttgaattgtctttcctttccttcccctttctttccctctcaaacactctctcccacctctctctttatgtcccatccctctgatgttggatgcactacctgcaataaaaaacccaagaacagatcttcttgaaacggcgttggtcactagaacaaagtgtacacgtttggactcggcaggtcgatggtctggctactatcttgccgtgtcatgttagacacgttgcgtttctcttccctccttgtctgattatgtccctactatttccagcccggccggagccgggcttgatgttgatttacacgagatatcccatgctgttattactgttcctgctctatcttctctctcgctggtaatccccttagactgagccctaaatatgtaaactagggttccgtatggtcatctgctacacccagtaaccgagaaggaacaaaaggcaagaacgaagggccgtccatgatgggaaggcacgtgggtttgggggaaggtataaaatggcccctcccccatttctcttcttccctcctcctctccatctctctgaccaccatctcaccgtagcctctacgagacagcgtcgacagaggatgatgtagcacatgctgcttcacctaccacagggatcataacattactatatttgttatgaggtccatgtaggtctgcatcagataacaaactgggctttctcgtggatgttcctgaagtcgtggctctcattgccacttgacgagtcccacggaatacatgaggggtgtaaatctccgtagccgaagacttgtacatatagatggtcacctagttgggtagtcacagtacactttcacatatagctctaagtctaggcttgcgtcatgggtctgacttatatgtgaattggaagattccattccaggaagtcccacagttctatgtgcaagatatcaagggtcacatctccagagatccaggcaaagagatatgaaagacagccccaagtgaaacaagcttgaatattggtataagacccatattatccagtgcaaagcatcgtaaggaaccatttacgtggttctcgaattccaagtctccctctcaagcaagagatgagtgaaatgtaccacgctcatatcccaccattccaccatccccgagaccacgagaaaagaatacgcgcatttcataagagaagcgcgagagcaaaaaaagaagaaagagccatccaatttccttcggtagtccgctaactccccgtgtcaaaagacagaaaaataaatgagaaagtaactagacgcatggccgtggtgaccaaggatacatagcaggtagagaaagaagcgaagactcaagaaatgagaagaaaatagaataaacactcccacgcctggtttctctcccctcttccgctcagtcggttgtctcttacagggctccgcggtccgccgtgaaatcccagagcattttgatcaacgcgtccgggagcgtgtacagatccacgtggaactctccgactgtagaaacgaaaggagaaggttagcgtgttgttcagagtaaatttcaaggaagcagagaaagaatacggagtttcccttccctgacacacagaggaacttacgctcaacatcgttctttgtgtatgagtccgccgccttgtggtcatgaaccatctgcacgacctgcaagaggtcatcttcgttcagcttctgaagcccatcggcaagcttgtccatgtcaaccttgagagggtgtcagtcctgcagcgccaacctcagacccatctcatagaaccaactcacattcttatctgtgcgcttcttcttcttggcgctctcctcgccaccagcagggcgcttgtgcttgataccattctcatcaccggggaccggaccggactcgcgcagcgcagccatcaaagcaggcttggggttcttgaaggtctgcaccacaaaacgcaccgttgatcagcacaccatactttcgctatcaggggaaattcaacaaactcacaagcacatgcttagattcataacgggtctgggcgaagttcaggtcatgttgaatcgtgtacgacttgtcagcagtgagctcgatcgacatatcgaattcaccccatccctcctcctgaatacggaacggcgggtgcttgaaaactatttgaagtggacaaatcgtcccacgttagcctctaatcggaaaacaacacacacacaccccccgcaaccttgatcgcgcggccgtgggagtctgggtcgccagataacccaaaaatcaaaaacacaatagggaccaaacataccctgcgtggcacgttcaccgaaactggggtgcaggtggtaggtgaccttgtcgaagatgttcgcggggaccaaggcgcccttctcgttcacgagccagacctcaatatgccatgatcgctgtggaaaaccctcaacctccgagggcttatctctgtagtgtaggaagaaatcccaagtcagccaatgtggtctaatcccgcgcgttttgtgtgcatgtgtagagatgggcgtgggggtttgaaggaaagagtggtggtttgcaaagcgcgcctctccctataatccttgtgcgcattatcatctttgtgtcctgtaagctacaggacggacgtgacgatagcgttgacagggtattgtgggaggagacagtagctttcagaccggggtttgcgaagggagggaaggcggagataggtagaggggcgcatacataatgttctgctcggtgatgagacggacagtgcgcttgacctgttgagaaggagtgttagtgtatgcaagcttaattgtgctaagaatggagaagacaccaggtttgggcttgtcggctctagcgacaaacccacagtccaaggccgtagatgcaagtttgcggcagttgatgagagggttagatactcacgtcaggcatgattattttattggcgacttcgggtcgtcacttgagagaatcgtgaggttctaaggttttgaggccgaaaggggacgttggcgtgcggagaggtgggcgtctcggagacaagtttgcgcggttgtctatcggagtgagcaatgagcgtaggatatcataactaggcaatacctcaatgtaaccaggcagtaaggtgtatgtagtgaggttggtctattgatatattctcaaggcagttgataaagcggtgaattaaccttggaagctcaaggaggtttgagaatatctccaggcctatgtttcatctgacgctctctcactttctgatgagttacgcgtttaatctaaatcgtcttgagactatttggatcaaatggatatggctataaacaaatttactagacttatagcccgagcattgttccagcaaagtgcaagcaaaatctaatctttcggttttaaaaatgtactattttgtattattgcatgcgtttgcttgttaggcatactcatcattacttttgtttgtctttgttctttttcttcagatatcttcagggtatggggtgatgtgcaggtatattggatggggaaatgtctatctacttcccggagaaccatcgacgttaggaactgccctccatttcgtagactgcatggctcgcaatagctatccgaggagcatcttcataactgctgcctcgctcgtcgcgtcgtatgggatggggtgggaatgggatgtattggggatgattgggtggaacggtgtgaaaggggcgaaattgggtaatttttcaagagcaagctccgggacggcgtacccaaatgccttggaacggcaagtgcaccataattgggtatgctcgatcctcgaagagtcagcaatacgagagaaaaggagttgtttactcttcggcgttgaagagcttctcgttctccacctgggcggtctcgaaagcatccttgaaggcgttggcgtctatacccatggttagcgaatgcttgaataaagttgggataaaaaaacttactctcgctgttagcgaaacggatggccagggtctgagcctcaggctcaccctcagagacatcggcggcggcgttccagacccagctgcggtcactgccgacgttggcgctcaacttcatgtcgggcacgactggaagatacatattagcacgagatcgtctttgggaaatacgagccgtgggggatctcactgtagtggttggcgcagaccttaagggtcttatcgcggcgcatgactaggcgggtcttctggttctccttgtgcttcaacagacggacgtcgccggtaccacgctccttccactccttagaatcgcggtcgaacttgaacagcttggcgcgcatcttgaaggtctgctcctcaagctcctcgttggtcttagtctcaaccttctcggtcaagcgaatcacgggctcgaagtggacatcgacggactcctcaacttcatcctgaatcaaagaatcatagtcagtatatgcgcggagctaaaatagtcattgacactagcatagtatggcttggttgcgacgaccccactatcgggtgacaggggcacaagaccccgctcccatcgcggacacgtccaacaacaaccgcctatgccaacagcatcagatgtataaaactcacctcatcgttggccttctgggccttggaagagccggagggctcatcagtaggctcctcggcctcctccttcttctccttcttggggccaccaccgaacatggagaacatgctgtcggaggtcttcacggtggcatccttagcagtgtcggcagccttctctgcggtagtagcgacagtctccgcaacggtctcagtggtagacttctcaccctcgccagtggcggtggtggtctgctcagtggtctcggaggcagagatggcggggtcgggcttagtctcggtgatgtcagacatgttgacgaggggttcaagagaatcggtttgaaaggatagaaagagagatggcagatttccccgggaggtaaagtggaatttcagtaacagataatgtttgttgatcagagaaagcggcgatgagggggaaaaaattaatacttagtttgggtcccatacctggcagaacccgccaccgcttttgtctgccaatagtgtactctatataggtgtgaactacatgcaacgtggggaaacacacatcaaagagaaaacaagtgaacattctcaaggccaaagtgggattacggtttaaataagagataccattgcgccgactgaatagttcgcatgaaaacccatttccagtacagttgccacccaccaaacctgatcgccataaacaaaaaccagtcctcaaccaactcattaataggaaaaagaagcaaatacaaagtcgtaaataagctcgttcatcatttcgagccaagggttgagcaatccttggatttgccggaccggaatcccataacatgtcgcgcacgcgactgagctcgatccagcgcatcacatttcctgacgttacgcactcgatccatcatgctgcgaaggtcaaacttcggcgctgacttcccaattcgggcccatgcttccttaacaaggcccttggcttccttgtccacgcggctagaccgcatttgcaacacagaagcagcacttcggaatcgctggatagtattgcgagtgaggacgtctgagatctgcttcgaacgtgataaaacggcatcgcgtgcatttagactctcacggcgtagctcctcggcatcacggcgcaagagatgggttctctgcaccacatctcccacgatcacctgcagatcggtggagaggcggccgtatacctcagtcaggccggtctgagccgtatggatttccttggcgaattgtgaagaaattccctgtgctgcacgcttccagtttgcgatcttcagccatggggttccgaagtcaacagtcatggtctggctgattggctgccttgacttggttgtaattgtcaagttgactaacccgtacgcatcctcacggttcaacttcagtgtgtatactccatcgaacagctgtgacaactcgtatgtaagagccttgttctctctatgaacacttacattgaattgtggctgcttcttggacgatgcaaacttatatgggggcttgatgataacatggcagtctccaataacctgaatctcaaattcgttcgtcattcccgatgatttctcagtagaaatagttggcacagagacatcatcggggattatagcccctgagggcacatgcaatgcttgcatagaagctgacggccgtgttgagattgaggtttgtaccactcgatccagggtcagaacagaagtggaagagacattggaagtcactgggaaggatgcattggatagagctgatccggcaaagcattgcgctagaaagacgaccagcactctaacagccgcatacccaatagagatggcaatggccgaaatgagagtcaaggtaaccagacgcagcgtgggggccaggtctcgggcccgcgtggcataggaatgtgggagccaattaccaggatacttctcaagatccgtaaatatgtggctttgaggaggcttgggagtatcggcagtggctttctgtgtctttctcggatacaggccaacaagagaagccaggtttcgattcaattgaccaggtgtgatgctctcgaaagtcttcaaatcgataggataccgtcgaaggactgcggtctcaccggaaactggatggcgggactccaaacatgtgtgaagactgttgtggttaagagggatcatctcgccggccatcttccacagtggctcctccgaaatcaccattgccgggactccatgacgttctaggaacatatgggcaagacgctgggtcttgaccgccgctgcatcgtcgaggccggagacaaagagaattgctacatctggtagagtccaatctgttgcagacgttatatggtagtcggaaccattccaggccgaagtgcaaaccggacgattcttgaacttcaggttcagtgtattaggtcggtccgcgtggggatcggccgtggcttccaaacattcgtcaaccaccagctggacatgaatcggaagaagttccgcgaaattcggaacagctccggcgccaaatgaggttggcacgacatgatatcgagaagattcagccgagttggtctctgaaccagcacatgagcttgagacaagcacatcgccgatcttgtcgagaataatatttcggaatcccggttgtccgacatagagcacgcggaagggtttgtccaggtcgagactctgtttcgtcatggtctgttgaagcgtggccatgaggatggagtcggttgaattgtaaggcagccggctcttcaattccaaggctgcagcaccttcaaagatgcggatagtatgcttgagctccactctctcgatctcgggccacttctcgggctccacgaattcgatcgaatcactggcatgggggaaggagggcttagtggttgtggtgctgtcatcgatggtacttcgtctggcagcaaagagggcaggcagctcctgggaggccgattcagtgcactgcacttcatccctgtctattccatcatcctcttggtggtcttcatcctgggcctcggcctcgctctcactgtagcgttcatcgaggcttgcaacgtcgtcagggctagcctggtcgatcaacgagcctgtatcggtttgttcggagtggctgccatcctctgaacgtatgtccgacacactcagagtcgcccagctatcactcagcgttttgggtgaatggtcagaaagttgatctgacgtcatgttggtgggccgtgaacgtgataaccactcctcgacagaagctgtcaggggtggaagagtcggatattgcagattcgaggcagtctgggcacggtggaaacgcctgtgaggcgagtctggatcgtcagtcatttcgccgatgtaaacttcatatagcacacgggtgcggcggaaacaggagcttagggatagcccaagcggtaggaagaaggtcaagaaaagcagagttagaaaccgagacggagatttagagcagggtaatagaaaagaaaagggaagatcggaagatactgggagtgctaggcagagactcagagagcccaaatagagtgataaggtgggtctgcggggagccggatgtcaggatgggtcaggtgcgtgtctgacttaaggaagtaagggcttacctaggtgaaggtgtgaaagcgacaaaggccaaagagaaaagaagcaccgtgaagatcaagaagtataaaggagaactgaaacgtagagcgttgacgaagggggggagttgtgttgcgataagagaatactagaatggatgacccaagtgacagtaatagtgggggagtacaaggtacctagcagttgtatgatggtgtcacccatgacagaagtactgggtacaagtcactttgctacctaacggcaactctctttgtctgcccctcgcaatgcagatgcactccaaggtactccaatatactccaaacgagagaaagtactaacttactaaacctatcatctctctttctttctttctacctattcttatacttctctatacttgataacgaatagctccactgtgccccaccatgaacactaaaaacatgaactacacggaaatgaaccgcgactggaaaaagacagtctagattgatctagttcacttgcatctgagaaatccaactctctgagagtagtgtcatcttcaccttgctcatcggcgtatgacccgaacaaccctgcacgtgggatctaaatattgaggatggcaatttgtacatgctgatactcatgtgtggtcttttcgacaagtaatgtcaagtgtataagcttcactaggagaacaaggaaagaaaataagagattatagattgaagctaagcgaccgggaaagctctagatgtaataggattccttgactacactgaagtttgaccggagccctcatatattttatatttctcactgtgcgcactatatgcctgattttatgcatatatccaagaatgacgtgcgcctttgatccctattcagaaactttcggctcgtataatgccccaacacagcagaactcctgacagcgcatgtagataccaataagcctcgatccactcggggccacgtatactcggtcatcccacagccttaggtagttgtcagcagacgccgcatccttgcaccccattttcagtcaggtataatgaatgatacgggccatttcatggtgcaggtcagcggaaagcctaagcttctcgtaacgaggctgctcattccgttcaacctcgaactcgattcccatgagcttgtgctctgtggctgcaaccgacaagccaagaatccgagcatctggtgcgaaatgaacggcttgacgagtctcggtatcggggtcacttgtgctcgctgtcttacctaacgtgtagacgaagactagtccgactattgcctggtctttgaagtaggtctcggctgtgattatagtctctctacagtcctcatcattctgcctctcaaactagtgtttccgtacctggtcaaaaggaggtacttgttcggggaccaatatgagggcttttgggcgacttctattcgtaaagatgacagctcggacgcgttcagaggatgggttcaatatccaagagatagctgtgagtcggattcaccctgatactggtggcgttgcagcgcttgggatgacatggactggaagtccggagggcggaacgtcacactgcgagaacttgtcgtctcgatgtgtatagctgcgactttacctatttccaaccccagaagaagcctactggaacgagccagatagtcaagttcaaacccatcatcgagttggtgaatccattgtcctacggtgccaggacttgaatggttataatactcgagcttcaaaccggacatgcgacttcgagatctggattgaccttgtatgcccgtagatgcatgaattttccggacgttcttgagtgacgaataggtctgatagtcatcggaatttctactgtatatgaaatgagtgagtagagacctcgtacttctgcataccaaggtcaaatgcgagagtgtgaagacgctggatcatcatcactgtaggggtcgggcagcgaaataactccgcagagagggcagtaaacattgggaatcggaatcatcgagatatgggccatacgtttcatatccttgctttgaaatgcacaatcccctaatctcactagtgagtattcaaacggtagaacatgtaacaaatatcttacatggagagctgtagaaatctatagacaggcagtccaaaggatgggtaggatttaggcatacaacctatggatggccgggatccggataattgagtatctccggcctatggcttcagaaaggctcctagccttcagacctgttcaaatgtactccgtgctagtagatagctagtagatggaatcatgattaggcttcaagaaggtggtgagttaatcaacgaaaccacttgacaaggacaccaggtcctaaacagagatcttctccaagcgcccggacaagccgaacagttgatgaaaaggagttcgcatcgatcgggggtagtgtaagcccaatgacactgtgcaacgaggcatatgcaagcatagaggccaagtcgcgaggtccaaatattggaataatcatgacgttctgcaatgcagaactaccagcgattaaactggcaagaacagatactacacttgatctaagccagaggcaaagagagctgaagaagaaagaaaagagaaggaagttctgggggcagggccaccttcttatagtcatcctaagagcggtcggcttctgccactattcacaaatgagacaaacaacgacatatgctcgcttaagaaatggtaacgtgatgatgagaacaggaacggtgtctcttatttccggtttctttgatgcgaggccatcatgtttgtttcttctgatatcagcacgagaagggctactgatacaatcacacgctaaacttgtttaggtatgtctgccgctggccgcgattctatatccaataagagtatactaaataatttcccttccttccatagatattggtacattcaattgtattacttgaaactgtgagtagcacagctggtaaaaacgactcttctatttagaatttaaatgtccaaaacatagtaaaaccgaagaagtaaagtgcattatactgatatcattcttcacgtaattgaccgagtgattattccatactctatagacaaccatgcttgatctggtatttgcgagggtcaagggtgggcaatgcgagaaaacaacccgtggatgtatgccacggattcaaggatgggtggggagagaggaaaggtatgtacatttcatgaatgcatgctggaagacaaaccacaaaaactgtcacacggggatggggatgggaaggggggaaagctgctgagaaaagaagtggccgatggggaggcaaaagaaatatggcacagagacgtggcgggagttgcttggggcgttgctcccagcctccgaatcaatggtctcctaccaccgagatgaaggtgtgctcctggtagaacataggatatagtgatgaaatctggagaaaacattggatataatggttgtcgagaccacatggtacagtaccaatgttccactgccgatgacacacaatttcttccaaatagaaccaagggatgaatcacaacagccaaacccagtggcacagcatgcttgatgaatgtgacaacagtgatgatggaaatggtaacaccatcttccgataataaaaaagttcagatccgttgaacgccgcctaggaaggaaaccctatgaccaacataagatgcaggctccagctggaaactctcgagggcggacccaagggatgcatgcagccgaataaatagacaggggagaaggagacgcagaaagacgtggcaagcactgagcactacggcaccagcatcaagatctatggcgaggcccagccaccagccacgtccacccattcgttgagacagctgccttgcttgccctcaacatcgacaatgtcagtgtcgcagcggcatcggcaaccgacaccattctccttgacttggtcagggttagcccagtattcgtcttcctcgatccgtttcttctcgtcatcggtagtcttttcgaggtaagggatacgggtgagttggcgggccggagcgttggccgggcaatgctgaatggtagtgtggcggtagccaaagtcacggaagtaatgaatatcactaggcgcgaggagagcacctgcggcgagagagtgaataggagcatcgccccactagtacagtcagtaaagatcccctggcacagtacaaagacataatataacatacccgctcattccaaaatcctccactttggtccatcatggtgaagaagtcctcatactccttgctgcggaaccaatccaggcgggcaatctcgaagttgctccagaaatggcacatgttgtagctctcgccttccatggcctctgggtctacgtccttcagattgttgtcaccggggtctgtctgcaggatttcatctggcagtttgtcctgcttgttctcttcgggagtttccggttgctctggttgctctggctgctctaggaacatttcccacagacccttggacttgaggttgttcttgcgcttgtaagcggccgcataccggaagatgttggggacagtctcgcgaagctctttcactgcaattgtaaagccataggtcttgtttgcctcggccatcttcaggaatggatcactaaaggtatcaagtcagcagattgactagaaaaatacgccggagtaggtatcttactaggtgatgtcgcagaagtacttgatctcgggctccaaacgccagtaccactcatacttcatcagcagagggtgcttgtagaagtgtctatcgcaaagttagctttataatccaagtccaaatctgccattgaagactgaccctgagtagaatcggcacatgtggtgatagctttccattccaccgtacatgatggcagcgtcaccctgcttcttgatgccctctttggcaacctcatggtcaacccaatcagggaatccccacatgctgttgtcaatcttgccgaattcgacttctgcgctggtgtagttcttgacggttgccttgaactcctcatcgaagtcaccatcgttgaggaaaacataggggtagtgccaccaccggttgaagtgtctctcgattgacttgagcgactggatcacgccctccaactccttatttctggcaaggacgacgaaggcggcattggcgcggggagcctttgcgatttgatcgggctcaataggcatacagcccgtagcaaagactttatcatatttttcgctgatttttctgtagaacgcgggaggttagttatcgcaccaaggagcaccaattgacagggcgatacgaaccggatagatggcggagtgcccgctggaattaggatccccccgggagaggcaggatgtcggacaaagaggagcagaataaggacaattacaaggcatggaaatagtaaaacaagacccaggggtatagaaatagatgagttgccctttaggcgaatccgccttcggaaaaaggcgaatctaggatggaggtggcccttctcggttggaacatcctccaacggcagactcggcgcgctgggcagccgtttcgtgatgcgttggatgaagctcatgagtgcgattattgtgagaccacacggatgattgtagcggtcagctgtcaggcccgggcgacagcacggggccgttagggagatagcggagatattgtgtcgggggtgtaatcagaggaggactgcgtcttgaggagaaaaaagttgagcacacgatcagaccgaattcggaccgtatggatcacagggaaatccgaaagtcaaaagatctcgagaaaaatggagaaaatgacagcaaaacgagtggccggaggaatgcctcctttcgtcccccaactttctcagtcccacggtaaatagatggggaaggcgttgggagaaacgcgggcaactgtgaacagcaaggtacacagaggagagatcggggacatcaaaacaggatgagggtgatggggggagagaagatggggaattggaagacgggatgggtcctaaagggctgcttgcgcctccctggtcttggcgaagtccggtggcctcttgtcaccctgagacggttattttacccctggttactgtgaagtggcgttctacctggtatggtatggtatgtatggtatttcgtggtatttcaggtgatcttctactttttgtgcgatgtacggagtattcttatattgaacctcatgtttctagcatattccctatatttgactcttgagtggatttgatgctgtttatttaccggattcaggattggcctcttatactaaggggcaaggtggttcagacggtagtacataccactcgtattagcccctaagctaacgaggaaagcttttgtgcaatcattttgatcccatctgcgaagactatgcttgtgctcgtgtgctttctatgttgtacaaactcttgtacctgaatgaaaaaaaatccgatggtgcagcttattgtatgtagtccacttgatccaccaatgcttagccctacaaggcgacacatagaatatgcgaaggcaatgactacgggtatggatacttgcctctggaatgtatcagttggcttaaatggtcttacacatccttccaagatttacccggataacctccaactcggagccctgggacgacctgtttcacatcacatgcttctatgtagatacaactcgttgaattagcgcatgacgatcgagggtccaaactttcgcaggccgttagacccgaaaatagcagcaatgattattgtgggcatttgaccctgtcatctgccattcagtctcttttatatgtggcaattattgagttggttaagtatcaagtacatgatatctcatgataacaggggtctttatgcaagtactagatacattatattatcctgccaatctcactacacgcatatgtgaggcaaatacggtattgtactgtatgtaatgcaaatttcattatccctacgggtctcctccgaggtctggaccgggttatctttcttaatttgcacgaacaaattgcaaaggagcggattacggagtatgttattgtgatatcttatggagtacatgttacagagtacgtcttttggctttttcccctatatcaccgacctacatttatagtagctacataggtacggagtacatacggagtacatgtacatatgtcggtagactacgtagtacgtatacatatttgttttgctcgtgtgcatcgaagaaattactcgaaggaaacagaattccaacagaatatatttagtttagcacactaaaatacaccactttcatatcaaagttatataatttcccatgcacactgtagatcccaacttgcttgccgggaagccaaaggaccaaaaggcttggttccggatcccggtcatccccccatcaccacactccgcatgacaataaactatatggagtcaccaccgtggggtgcccccttttttcatttcttcctttctacatcacaacatgactgcagtggtgaccaggcccttgtctgagggcaaaaccgcgatgatcaaacctccggaacccggcccctcgtcccatttccacaacaatgggaatttggatcccttttcgccagtcaacgagaatggaagcttcgaattcgatcgagtcttgaagacagggagagtgtgtcgacgagtcaagcataaacacgtctttcgcgcctcatggaaaccagcctacctc
